United States Patent Application Publication US 2022/0256795 A1 - sequence listing, part 4

SEQ ID NO: 3 - DNA, 2093669 bp, Glycine canescens
aaacccaaaccccaaaccccaaaccccccccccccccccccaaaccccaaaccccaaaccccccaaaccccaaacccccaaccccaaccccaaccccaaaccccaaaccccaacccaacccaaaccccaaaccccaaaccccaaccccaaaccccaaaccccaaaaccccaaacccccccaaacccccccaaccccaaccccaaaccccaagccccaaaccccaagccccaaaccccaagccccaagccccaagccccaagccccaagccccaagccccaagccccaagccccaagccccaagccccaagccccaagccccaagccccaagccccaagccccaagccccaagccccaagccccaagccccaagccccaagccccaagccccgagccccaagccccgaaccccaagccccgaacccccaagccccaagccccgaaccccgaaccccgaacccgaacccccaaccccgaaccccgaacccccaaccccgaacccgaaccccaaccccgaacccgcaacccccaaccccgaaccccccaacccccaccccgaaccccaaccccaaccccgaccccgcaaccccgaaccccgaaccccaaccccgccccacccccaccccaaccccgaacccccaaccccgaaccccgaaccccccaaccccgaaccccgaccccccaacccaaaacccccgaaccccccaaccccaaaaccccgaaccccccaaccccaaaaacccccgaaccccccaaccccgaaaccccgaaaccccgaaccccgaaaccccgaaaccccgaaaccccgaaccccgaaaccccgaaaccccgaaaccccgaaaccccgaaccccgaaaccccgaaaccccgaaccccgaaaccccgaaaccgcgaaaccccgaaaccccgaaaccccgaaccccgaaaccccgaaaccgcgaaaccccgaaaccccgaaaccccgaaccccgaaccccgaaaccccgaaaccccgaaaccccgaaaccccgaaccccgaaaccccgaaaccccgaaaccccgaaacccgaaaccccgaaccccgaaaccccgaaaccccgaaaccccgaaccccgaaaccccgaaccccgaacccccaaacccaaaccccgaacccctaaaccctaattttccccctaagtatttaaaaaagaaactacaaacttgtattaaaagttaagaaaatacttgtctcaacttgtcagtgatttctgttttcctgggtttcatcatccgacccataagagatacaatatcttgtccccctttaggtcgtgcattggcagccagatcatgtagggttacatcctttaagaacaacaatccaaatctatcaaatatatatagtatactcaatgtctagaacaggttcttatagagtgcactaatacaagcctttgattaaaacaatcaaatatttaatatatcaatcaaatttcaataaaaaaaatggaaattaatatttaatggtatatttatatttgttatcaatattttattctaactacatacattaaaataatttttattatatattctatacaaaaaattattttttttaaagttaaaattttcaattaaaccaaatttattaatctgaaacaagcaataaatatttcaatttatattgttcttatgttctataattatagttccgttttatttccaatttcttcttccttgttttttgttggtaaaaattacattatgttgaatctgatgcatggccttttgaacctacacagatattattgatctggtgtcttacagatctattcaaatttgtttattgcctaaactaacttttaagctgattaggaaaagtattattattcttaaattactgaacttttggtggccagatgatgggaagggttttgtttcaatttttggatcaggagtcttgagtgatatgtggttgtaccacttggaaaacgaataataaagattgaagagtactgaaacagaatacggatacagaacatatgttgagattttcctgaggagaatgtccagtgcattttatgaccaagtgtattgatgtcttgtacatattagtgggtatgagatacactaaaccctacaccccacaccccaaaccccaaaaaaaaccaaaaaccctaaccctaaaaatgtcaaacccccaaatcccataccccaaaaccccaaaaccccaaaccccaaacatatcaaatatcataattcaggtttatcatatagaggaaacacagctcgatacactaattgttacaaattatacttaccacgtccttcccacatcatctgatgtctttgtcacaatgaacttagtagtatagtaacactcctaaacagcatatacatcatataatcatatctcgggaaatcctatcccaaagcacaacttgattatctttactctcaacaacagtatccctagccaaaaatatctacacaatcatgcaaaagaacaaatcaatgaatcttaacaaaaagaaaaaataagagcaaaaagtcagtaaatgagaaaaaccaatatggcataaatacatacgtaaagcattctgggattagatgtagtcactattgtgttacagttcacaaaacattgtacactttcctatatataaccaatgactaaaattcacatatgcacattttttcaatatcattagatggaagcatatattttttcctagttggataagcctcagttttcaaataaagcaaacagagcagcataaaatctagaaatttgaaccaaagttatcagaaatgtaaagttttttattcatattgtacaatttaattatattctcaaaaacatcaattcatgtcatcaatacaaatctgggaagacacaaattgtggctagactagagtgaggattctactagtgcatcatccagataaagcccacattagttagggtcctgtattgacccaaatgaggaaatccacctattttcacaaactttgttgaggtgacgacaacagcaaagatatttaattcgattttcttatatggtggcatccctcattttgagccaaattttatgaagattgagttttctagaaacaaaaattctttcaatgtttgtcacttataaggatacagtaagaaattgtagcagcaagcatttaagtatattgaacagtatccatatcaagttattaaaattgagtactaaaacaactagaaaatgattagtgtttaggtaagaaaggagaaaagagactcagaataagaggataccaaattgctgtggtatattatgattcaacacaaaaaaaaaaacagaacattaaaccccattagtgatagtactagactaatagtattaatcataaagaaatattacaaaatctagaaaaaaactacttagaaatcatacgaataagatattcagatatacactaggaccaaacattctagcataaacataaaatttgaacaattacagagtatttgattaaacactcagaaaaagacctttgaatcacaacttgacaatgattataataactgaagtaccttgcttgcaagtagaaaaaaagtggccattgaaccagaggaagatccccagaattcctaggcattaaaagcaactccatttcgctgtgagcaaggaaaacatgaccattcaggtattaattaagaaggaaagaagaaagataaataaaaccaagaaaatgtatagcagcttccatgactaacaagttggttacataatcctcctcccttagatttcttatgatctcattccaaaagggggcaaaccgagcagcatcaaccttgttattctccgcaaccttcggatgaagagtaattgaataagtaatatttactcaagtttaaaacaaatgttcagcaaacatgagaccagtgtactgtaaccttcccatcaacataaaaagtttcttattttagtgttagtacacaggtatcaagcaaataaacatgaatttagaccaaattatgtcttcctttatctatagcaaaaggctgacctgaatagacgactgatgggaactcctgaaaatataaaaattgagaaaaactatataagcttatacaaaaaatagtactatttaaggggaaaatctgaaagaagagaggatatattctcagagagctacaacagagataggacacatacatatacaattatcttccaaaaatacagaatgaagatcataaaacaggaaaaagcacatttcacaagcagcaccttttgggtagaggaacatgaagtgtgtccataaaagctccaggaaactgctcaaaaagtttgtgcagtgcttccaatgacctaatctggtgaccgcatacaaccacaaaaaaagttatgccaactaatcttaaattcttaaatatacaggacaagtgtgtaaaacacataaatatctagaagataaatctgaaagaatgggaattaacaaatcggaaacagccatcaaaacactcaaaaatgggagggggaagcaattttacaaaacagttaaattgaaggttttcccatcacctaaaagcttctatactatttattaactactaaaccagtgaaatacaaccctcaatactaagttcagcaactcctgaagatataatacgcttacttggggacttcttactccagctgttccaagagtctccgctagtggaaccccatctaatattttcaaactcctgaagatgtcatttttaaattgctcaaacaagatatttttgctgcaaacttttattgaatgcaaataaagctaaatccaaaaaagctatgaaactgcatgcataacagactatattaacaaccctgccactatacaccaaactttaaggacctcttgtcagacattcttccccattgagaaagacagattaaaaagaaacaacatatcctccttttatgattaaaatatttaaagaagggggaaggaggtaaacaaacaatgaaactatacttacaacaaccacaggagtccacacgctaacaactttcaaagtcactgattattttaatctagttattatgaaatattttctcacattacaaatatgtatgaagtttgtaagaaataacacaagatttaagtgacacaattgcaaaactcttcacttgttgtatatattataaaagcataatatagcactcgagttggaaattttaaaactgatcataatttaaaaaaagggatgaccgatgaccattcctcattttcatcaattcaagatagagctttgtttcacatggaaagaagcaagttcttgaaagaaaattgaattcaatgtcatgaaggaactcaacaaacaggcaacaataactatttttcttggatcaattctttcatttgtaaaatttggccaacctttccttcccctcgaaaccctaagacccaaagaaaacctaatgcaaatcacatgcatgtcatgtagcgtgtctttaatataattgtaatcacaaagagacaaataaggccaacaagcagttatagattatttaaaggaaatgaaaggaaataacagaccggaagaagaggagttgttgtcatgattgttcttccccgaggcgctgacaacaaatgggcgataccctttagagtaagggtttctcctcaaaacagtgatctgaaacactttgctccttcccaaattgaagggaatgggtctgtggcaaaacgaatttgtgtggaaaaggttctttgcatgaacagcaaacagatccattgtcacttttttactgcctttatcgtttctggatcgatgacgaacggctaagctaagaagcgagaaggatagaattggaaaaataattttagaaaaataaagatagtaagtggagcaacaacagaagacgatcacgaagaggatgaagaaagacactagtacgattatgaaaacgacgctttggaattggaaagagagagaatatgctttatttaaaccgaattgtgtggaggtcagcactggcgtacgttagccacaacctcctatgcgatctaaaattgcgctggcaaagataacattaatctaatttgattgcttgccaatagttacctatccattcctctctccaaatcggttaactgaattcaactaaccttaatctaatctggtgggttgtaaattgagttaaattgattaatcattctttttttttggaaaaaaataaatatctcgtaaattcagtcattcattaaataaataaataatttaaacataatatcatagtcacaaaaatatttcgttattatattattttatcacaactattatttttttaaataggggtattatcatcacaagttaaataaacttaaaataaaataataaaataacatgaaaatactcttatgtgattcttattataagacaaaatttaaaatgaattgatgaattttttataaggcatttcacaattcttatgtaatatttaatttttattaattgttattattaaatattttaaattttttaaatattttttcatgtcttaaatataaacaacacaaatttcttatttttttatttgaaatataaacaaatcttaacttataaagtattatttaatgagattatacttagaatatcctttatttaatatagttaacctttttatgtttaatatcaaatttcaataaaagatagcttaggaaaaaagattattttttagagaaatgataggaacacactcattcacacaccattttattcattggctgaaatttattgaaaatgaaaaaatctgataggtctcacatcacatataatgattatcttgattttataattttcaataaattttcatcaattagagagagtgtttgaagtagtgtgttagagaaagtgttcctaatatttttctattttttatttagaatgacataatttaatgaagttcactaatttcctaaataagtgtgaaacatgtctttttcttcttataatcaagactcgagagtcgagagagtatttgtacttgttattgatggtgattcaggactcttagactttaatatttctgcatcactcataacaagttaatgattattaataaggataaaattgatacattagtagtatttattttaaaagtcaataaaatgaactacataaatttttttattgatttgtgtgattatctccaaagggccttatttagaccatagggggtaattcacaatatatcatgtccaatgaatttctccagggatgttttggtgcaaaaaaagtgttgttttgcctcaaaaaccaacaaatgggcgggatagaggtggtaaaaacaatgtcatgtttaaagataaaatgagagggcatcaagtggaccttccaaggagggaagaagtgaatttgatagtaaataacatattcataattgagtttgaagagggagatcatataaagccttagtttcttcatgatgcatggtaggttgaaaacaatatgcaaattgacagacaattttgaagtggtggatgtagggcacaatttttacatggtgtagtttgatcttttgcaatatagggaaaatgtgattagcaggggtcagtaattggtctaccatcaatgcataaactcacttgtagagcaacatcttccaaggtaaagcaacatgaatcaattattgaagtcagattgaacatgttttcttaatgaaatgactgtctatgtcaatgtgcttggatctctcttggcaaattggatatcaaattgtatagttaatttctaataactcacaatacactgtaattccaaccacataatttcatacgaattatttagtaaaagggattgcctaagaatatctgtaataacaataatttaaaattttggtatacaaatctttttaagtctttttcacgttagtattcttagatttattaactatttatatccttttatgaatacattcaaactccacatatctagatttctcccaaaatttccatagagttctgtaagactgagaagatggcgaagaggatgtcttgtccttttcttgatcatagtctaagcctatatttgtccaatggatccttatgacttttttaaaagcatttttagcatgtttgatccatccaaaaatcttattaagtctatagtaagacatgttatttcccctttcagttttaagacttcaaataaataatcagtcttatcaattactttagctctttcaagagtttcttctaaagtcttaacctttttctcaaaaatcatagttgatttctttagagaaatattttcacaaacaacttgtactttctttatacttatattccacaaaaatcacatgtgtgttttgaagaacatcataagccatttcctcatcatttgataaagattaagatgaactactactatcaaactcaaaaaagttcttacattatcatttattgatccactcgatgagctcttaaacttgttcatgtgtgctttgaggaaggctttttcttttcaaatttttcgtctttcttggttggactctccaacattcaaactataagatttaagaaaataaattgtgagagtgtggattaatttcaaaagagttactcttagataaacttaatccatcctttattattattattccctccaatgattctaataagtagttaatattacccattgaacaggaaaaagttttcaatggtaagtgatagacatatacaatagaaacttgtttttgttttaaggggcgtttttatcactaaaaataacgactttccaggggagtttaaatagcaatggaggatggaaatagcaaagtccatcaagaattctcctactctgcaaaatttattttggatatgtttttgggtatcttaagagacagaaacattatgtttttagtaatgatcatgtttagggtaagtatttgctgttagttcttgtcttttcaccaatattttgttttatattaataggttttggtatgatgctacttgtaattaagttttatgcaacaatccttgcccattttgtgcttggatttgactattaataattatacatttatagaagaagaaaagtaaatttgaattatttaattttgggagaggatcacaggttcattttttaatataatgacttatgcttgctaaaattttcttcttttctttattattattagtctttagaaaacattgaataatttaggtaatgaacaaaattcattggcctatttgggctcattggcttgtttaagcctataggtctattgacttgtttatagacccttatatagaagtagactttcatatcagattagacttttaaacaggtcaagttaagacttaaaaaaatacatgtaataagtaaataaatcaggctcaaacttagtaattatgatgtaaatcaggctcatacctgtcaaagcctgaccaaagtctgacctaacctatttccacctctactcacatctaaatcaggagaatgaatcattaatgagatgtgagacccaccaaaatatattgtaactcgagaatagaagaaaaccaacaaattcatctgaagacccctgattttttcttctattcgttaacaggcccgagaagttaatagtacaattaataacttatcgagaaattgaaatattcaatcagattacaggattagaaaacacagaagcacaaacattatatttaaacatggaccacgataaactacacaaaggttattaacataccctaagaggaatcaaaatggacagataggcatacattaaaaccctttgcaatcagggcagtcactcttttaaactaaatcttgcattttgaacctttactgatagctttaacttctgttcttccatatcctttagcaaagccagcaagtttgctctataaacttcacatcgttgatttgtgacctctaactcagcagtcaactctcggattttcttttgcttctcggcctgttgcataggatccaaagggaatttgtttataataccacgtgtattaacaaaaatacaggccacatattgttaaaaatcagatacggataaattgaaataataatttcttattcattcactcactcattcatccattcattcactcatccatcacctcttaaatgaggaatatttatacaagtaatgttaacatcctgagcacaatattaggaaacaataatttaaacttattcttatctagactattttaacaacctgttcctatctaagagaaacaataattcaaattcaaattctatattcaacacatataggaagatgttgtcagttctcactctaatgtgtacgcttaggaaaatccaaatacacataaattttgtgccataattctataaaataattagtgaaaaggaaactttatatatagcataatgttaaaaacttagcaagatgagcacaaatataatccatgaaaacagcctcaattttaagaggttcaatttaaacttacaggctaagcaaattcaatttcttaaattactggagaagatgagaaaaaaagatcaccatggtcatagaagttgcagaagtccatcatagacaaacaagcacgttataaccacaacataagcaatacagattcttcacataaaatagtataaatagcacatatttttcaagggaaaattacaatcagcctcttaaactttgaaccttttgcaaaatggcaccaccaacgttaaatttgtcccaatctattaactttaaaaaatattacaatagacccttctgtttagctaccatttaactcaacaagggaagagctacgtgacatctaattcattcattttatgaaaaatctctttgttttaaaatataatttacgaggtttttaaataatcatcaatttaaaaaatagtaagtggcatcgagtccaaccaccatgccacaacatcactcaaacagtaaccatgtaccacaaaaatcttgcacaaaaataaatgagacagagacagagaaatctataatgcattaatcctaaaccatcactcaccatcaccaccacccactgtcaccagccagaacataggttaaaatcaagatgcaacctgtctacaactgcatgcacaccaaagcatagctccccaaccaaaatgtgcaaacccactaattctagagatttgatcatcaaagtgatatttacctcttcctaattcaatcttcccagtttttgacaaatatattagatttcacaatttacttgggtttttgtgtaaaaagataattgtgtttttctaatttatgaacatttattaaataaacaaataaagcagaaaaaaatggattgtgaggatttggcgatcatggatggatagtcttttgacatgtcatcaagtgttcacatggtaagcacacctctgtaatgagttaaaggatgctataaaaaacaaaaggatttactggcatatgagaaatactagcaacacactaacattttctttccaacaaactctttataaggtagaattcatgttggtcccactaaatatgttggtcacatccccaaactagtagaactcacatgcagttcaactaatatgagagagtcttaagaagaaagtattagagaatatattgctagtttttttttttttttttacagccaataaaaagagattatattaaaaaaaaggtacaaggggtaccctaacccacatacaaatttgcataacagggccaaacaaaaagccaatcaaattgcacaagatattatcccttcccatcccaacgatcagcaataaatacccatctataagattccccaacattaaatgtctcattcaattatcatagcgttaacattgcagcccacaaaaacccaaggagaatacattgctagtattcctcattggtatattatgtaaagtttaaggattaattgagacaagtttaaagttggtggtagcaatttgaagaagatcaaacataaatgttatttacttaccacattgaaaagcattacctagaaaacaacaagcatgatttccaagtgccagcttggaggttgtacgcggggggaattgccccttccttttgtacattatttttttttgcttcaacacaaaaacatgtacagtaatagtatagttccttggatgcagctcattgtagaatttgccagggaaagactttgtgtacataattgttctagtgagaacctaatggctttatcatctaaggaaaagatcttaagttcaaagaaactaaccacagattgattgcttggaacatcttcatctgctacaagcaattcacccctgcttccattggttactatagctccctctgctgttccagaactctgattttttattgcgcaaaccttcttagcagcttcttgcagagctctcatggcaacatgatagatttggattgattttgcaccttcttcaacatatttgattgcttcttggcgtaaattgttataacaaactgttacagactcacgagaagtacttggcaattcagatgcatgttcatctaacaatgtaccggttttagcattccttgtccagcgtgtcaatacatactgagatggaagagtaagaacatttttagctctgaagactgacagtatatgcctacaaataattcctgaatattcaaacatctgacaactgcaactagctttcgtctcaaaagaattaaaagtcacaacatgagatttttggttttccccaaatttggcaactcgatatgtagtgattgtttctgaatcatcaatttttgtagcaggatttgcaagagtctctactaactcctcttggaatttcatgaatatctttctcgtgtaaagacccgcagcttgtttttccataggagatggtgtttttaaaactggactactattagtagtgtcataatctgcttttaattctctttcatgccaacttgacacagctttctcgtattgtctaaccaatacctgtagagtggtggatgaattcacatatccatcaaagaaagaattcaaatattcattttcctcattcaaagatatctctccaaagaaagtctcccgcaagtacacatgaacccaatgttgtcgtgcgctgtacattgactgaagccattcattgtccatgacgtagaatctttccaagagtgagtgccaataagactcaaactcatcaatagtctcactttcttgaacgcatttcttgaattcagtttcaaaagcaggatgtgactgacataaatgagccagtttgcctcgggtttctctgaatatgctccatttacaaaaccgatggcgagttgaagggagaacttgggcaacagcaacttgtatgaaagggtccaaatctgttgtaatagagacagggtggccgccagacatggcatgaagccaagtcctgaatagccatataaatgacaattcagattcattgaaaatcaatgcgcaaccaaataacacaggttgcccatgatgattcaacccagtgaaagaggtaaatggaacccggcatcggttagtcttgtaggttgtgtccaatataacagcatctccaaaataagagtagtttgttctagatgttgcatcagcccaaaatatattcccacacgcgagattattgtcatcctggactgcataaaagaaagcaggattatctgcctgcatgcgcttcaagtagtccaatacatgatgacccccaccaccaagggtacgctgtctagtgatactcatttgtgctgtaagggacgaggggaattatgatcaggattataccaaatatggtgggttgacatgttacagagtcaacctacctaaattttttaaacaaaatccataaattaatgctgaaaaggtaatcaattgagaacttcaaactcataagtcataatgaaatggcaaagattctgtgaccctgctatgtctaactaatcccattacgttagagacgaatgtgaagaacaatactatatttttaatgactaatgcaatgatattactataaagcagattatcaacttacatagaactcacatagataacacaattagccagacatatataggttcaatataagctgggcctcatttttttttaaagaaaaaaattatagttaaaatctacaacatgtgatatacagatgcagcttacaacccctttctatgaacacgaaaactctaatatactaaataatcaacaacataaataattttctgaaatatttcttctgtacgcgaagaaccaataattggagcaactaaacaagaacaagtaaacagcccagaaattattatttaaaaattacggtcacagcggctgttgggggtggagtcgcgacggtgcaagctcgcaaatgggtgacaagaggtagcgtcccgaccaagtgactgactgcggtggcgtcgtgggcgtctgctggatgtgctcgcgatagctttctttcttaacggctgaccgcccggtggctgagagagcaaggcgtgagggagggggagagggagagttgggacttgggaggaggtcgtgcggctgaactgagttgacaactgtgaggtccgggaaaggtaaaggatgtgttttatttgatttgatctgatttgagcaattttgattatgattattaatgaaacaaagacactcgactcccacttgaaagtcacttatatatatagtttgaatgtaacttatttaaaaaaaatgtaattattatcgttgaaagttaaaataaaatattatgataataaattgagaataaaaacatccaaaaaaagatgacatcaaatataattatttcatttataataattataaattagggtatgaaaagatgaaggggatacatattatttaaacaaaggttttttatattgtcaaatttattaagaagggtaaataaacattatgatgttgaatttgtaaatttgtgataatttaatttatgaaaaatcaaaatttaaatttagttaatgtgtgataattacacctcatttttagttttatgacttatgagaccatttttgtcattaagcaatagttttaaaacaccaatttaatattaagttatattttttaatattaatttgaaattaagttaaaaaaataaaaattattttaagatgttctctctcctttatcgttgggatgaaaataggtcgaccacctataaggagctttgacctgacctgacctgacttgtttattataaagttcaggctaagactttttgaaaagtctgtttacataaaaaggtcatgcttaagcttttaaaaaaaatttttaggtctatcaggttgacctaattaatatatatatatatatatatattaaaacttaaaaataatatatttatttttctaaaaatataaatttccttattatgaaggtggatgatcaatcacttcaaaaatcaccttgaaaatcccataaaatgatcattacttatttgaaaatataagtaagatgttgagacattttctatttgaaaattgtttatttaactttcctaaattgatttaaagtgttttataaaattaattttcttattaaaaataggctttttaataggcttgtaggtcaaattaggcttttaaataggtcagaccaagcttaaaaaaaatcctatgacaggtaaataggttaggccaagctttatgtttttaaatcaggcctaaccaagtctggtcttgtctgacctgtttccacccctatttgtcgtggacacgagctaatcctgtgacctaaacctcatcatgatctcatgggaagagcttgtgtgtcaccaccaacttcttttcacaccaaattgtcaacgacatatcttcgattgtagaaaatcgtataacaaatccacaacatagtccctaacttccaattctcacgccatcaaaagtgaaatcctcaagttccaagaatcaaaatatccctcttgttttagaaccaccaacctccctccacaaattctctttgcaaaccttaagcaaaaatcactagctaaatcaaattcctttccaaaacactctatgacaccatttcaacacccttctttaccgtcatcttctcaatgcaaaatcgttttaacaattccaaaaagaaaccccaaatagagagaaaaggtgtaggatttggttaaggttacaatgttgacaaccagccaattgaaatgggttgggtatgccatgcggaacatgagccaaaaaagaaagtgttggtttggtgttttttttttttttgtctttttttctttcaaaaatgggtattgttagatgtggatggaaggtttggggaagaagatgggaccagtgaacgttaagtagcttttgatgaggaagataaattttaaaatattaataaaagagcatgtggcggccaaaaattgtcattatatgtaaattgattataataaatttaaatataatgacattttttagccttctttcgggtggttggatgttcttgatttttgattttcaaatggatttttcaatacaaaacgtgtttaacaaaaataaagttgaaataatttttaactcattttcaaaacacttttacattcattttgaaaatcaagatttttttttttgtgaatttgatttttagtttaaaaaaaaaatacaccttctttgcatttggcaatgactttttctattgccaccatcatcatcattgacactattatttggaacaccctaaaatcttttccataagattgataaacacccaagtattatttgatcattaaatcattcttgacttttcaaacaatagtttgatgaaatataattcaaatcaattgttacatagaggatatacaattaagaacatattccaaagaaatttaaaaaaaaaggattgcacattaaacacttgtgtatgaccatccaaagacttgtaacaaagcaaagacaaagcttgatttttcacaaattcaaaagtcttatatgttgtgccttattctttatttataagcttcaatgtgactattgtgggggaattaaaaatatatataactttttaagtacaaatcatcctcctaaagtgtacccgtgtataagagatgcatgggaatgcatcagtcaattcaggatcaacaacatttcttaggccttgatcttaaagaagtgacttcaacgaattgtaagggcttgatcgattagcaccttggcattccatcaaacaatcgaatggcctgtgtagaatgtaagggtgctaaaataactagtatgaattgaactgaactgaattgaaattaaactgaaacttaattatataaaactcaaactgaactatttggtaggttcggttttataaactgaactatgtagagaacaggtcaattcacaccacgttgaactgttttgaacttttgatattataaaagaattagaaaacgacgttgtagtttatgatgtttattacttggaatcataaaatttgaagtcaggagagacacccattgaatttgcagaaacgtaacagatcattgttctagattgtatggaatatgcaatgctagcatgtacatagtgtctaggttttgcttcaagcctttgaaacaatatttattatttcaatggatgcatgtcagttatttttgacatccagtcttaatgtatttggtctagcttggatgatacctttcagattcaatgctgttgtaacttgtaaggtattttacctgcaattgctcacttattcaaaatttctcttagtttttattatgcaattgaggttatgatagttataaaaattgaaactgaatattagatgctttatttcacagcatataggtttgcattttgttgctgaaaaattggaacaaaataattaaaatgatgggggtgaaagaatgagagcgacaagagaaataggttgtacaaaaacttgaatattgttgatagagaattagagattgcttagaactaatgttgcatttttcaaagctattaaatcaaatatttcagttcaatattttaaattaaaattgttaactaagttgttattaagaactgaactatttttcttcagttcagttattaagaactatttttcaaattcaatttgggagaaaattgaaacaatgaccactcccactagaatgtctcaaaacgcttaactccgatcctttttttgtatgaccatgtaaaacattatggacaatttgattattatttgacattacattagctgtgaatatgtggagtttatatgtattactagtatttttttaaagtttctttatttattttaaacaaaactattatgagtttatttgtttaaatttatttattaaaaaatgcttattttaataaaataaaggattagacaaacacattataaaaaacaaaatttcaaatccaatccggttgtctaggttgggtcggatctaaaggacctaaaccatacatccgggtacccgtgcgtttaccatgtggtacatgttgcctggttagcttacaattccttattacgcaaacgtaggttcaggaggcagaggctctcaaccagcaaatgacggagttatgcttatatagcgcttcatccacgctaattcccaaatctccagccgataggataatgaatctgtgaacggactgggacgagatttcagttattttcctcgatcagtgatattattatgtgagcaaattctatgatcttgtttttttttttttccttcatcgccgagacgaaaatgtccgcatcgcaatctcttggaggtccttcccgctgcggcagagttgtcggtccatcactggacaagataatcaagaacgccgcctggcgtaagcactctcaccttgtctccacctgtaaatccacccttgacaagcttgaatccctctctgagtcctccgaaccgtctccaggcgacacccaatcccctattccaggtctttcctcctcagatgccgactgtgtccttcaacctctctttcttgcgcttgactctgcctaccccaaggttgttgagcctgctcttgaatgtacctttaaattgttctctcttggccttgtctgcggggagatcaatcgccctgataactcgagtgcttcacagtccggcgttgtcttcaatatgattgatgctatctgtaagtcgggtggccttggggaggaggcgattgagctgggcgtgctcagagtcttcctctcagctgtaagatccccctgcattttgatccgggcagattgtctcattcaaattgtgagaacttgttacaatgtgtacctcgggggggtcaacggcactaatcagatctgtgctaaatcggttcttgctcagatcatgaccattgtcttcaccagagtcgaggaagactccatggatgtctttgttaaacgggtttctgttagtgaacttttggaattcaccgataagaatttgaacgagggcaattccatacacttttgccaaaattttatcaacgagataatggaggccagtgagggttttcctctcaaaccatcgtctatatcacctcctctggaagtgcagaatgtccacacaccttcgcccaaagcagcggatgaaacaggtaccgacaagttcgataatgaagctggagctgatggaagtaaaataagggaggatgggtttctactttttaagaatttgtgcaaactgtctatgaaattctcatctcaacagcaccctgacgatcgtatcctcttgagagggaaaattttgtccttggagctccttaaggtagtcatggatactggtggttcaatatggcgcgggaatgagaggcaagtagtataatacttactattcctgtacaaccactatttgtagaatgtaatgtaataattcacgcattatgaacttttattctattcaagggctttttgaagtgagactttcaattttgtagagaaactagtgaatttcaattacttgcatttttcgttgagttttgaactttgaactcctggtttgttttgttgtagatgcttccactcaaacccgtttaaaagtcaaacagttatttatgtgtccaccattcccttctttagttaacaggatcaaggcaaacaatttggtgcaaatttgcagcccttaaactgtaaggtcactatttttttctttgaaacagtgtttctgagcttcttggagaatgtttggtgtgtcctctactttggaacaaatttggtaaattaaaacgagaccttaaagtttggttgaggatgtcatttagatagtcctttggtgtgtttggttgtagtggaatgctcatatctcttaggaaatctctttgcccttgaacttgtaagatgatgggcttatatttatggtttttgtttactcatatctgcttcaagagaactgcaatttcttatgtaaagagaaacagctcagccttgctacagttttttttttttattattttttttttatcttgttgagcggtaaagttgtgccttggtgacttgttggtcatgggttcgaattcggaaacagcccctttgcatatgtaagagtaagtctacatacaatatccctcccctttatcttcgcatagcgaggagcctttgggcaatgaggtaggtagttttgagggcgagccctgacataccggtaaagttgaactttggtgacttgttggtcatgggttcgaatccggaacaacctctttgcatatgcaagggtaagactgcacacaatgttcctcccccttaccttcacatagcgaggagcctctaggtaatggtgtacgtggttttgagggcaagccctgacacaacggtaaagttgtgccttggtaacttgtggtcatgggttcgaatctggaaacaacctctttgcatatgcaagggtaagactgcgtacaatatcgctcccccttacctgcgcatagcgaggagcccttgcgcaatggggtacgcagtttagaaggcgagccctgatacaacggtaaaattgagccttggtgacttattggtcatgggttcgaatccggaaacagcctctttgcatatgtaagggtaaggctgtgtacaatatccctcccccttaccttcacatagcgaggagcctttgggcaatgaggtacgtggttttgagtgcgagccctgacacaacggtaaagttgtgccttggtaacttgttggtcatgagatcaaatcaggaaacagcttttttgcatatgcaagggtaagactgtgtactatatccctccctcttattttcgcatatcgaggagtctctcagcaatggggtatgtaaattatttttttttgtatcaagaactttcttttcagggggtatcttatcctaccctagttatattctcttttttctctcaaataaaattgctttttcaataaaaaaataattatgtactgtttttaggagttaagtagctaatatgcaacatttttttattataaggaggtgacaagtttattaaacatataatgtgataatacacataaatctacctactagcctgcccataactttttttattatttgttggttcaatttaagttgaagaagttttggatgtaacttgtttcagctacttcttttttaaatctctatatgatggcctctttgctacgtgtggtgttttaaagaatatttcttgtatatcatgttcttcatattgcttctttgtttatctgctctttttatttcaagaaataaatagacgatcctttgattttttggtggggttgtatactagttatcggagttagagaattctcaaatttatgacccatcaatgttttcaattgatatccctttttatacataaaaaagatcttttttatttttatttttatgtataaacataagatggatgattgtatatggtcttaaaacaaaggcatttcattaaccacacaatacattaaccactaggttctgctacatggaccaaacaacaccattgtattttctcaaaatcctagcctttagagaggtcatttagatccaagttctttctagttgttttgcttttttttactttgccttcctctacttgctatcctccatctgatcaactcttcttagtaggccttttattggttttcttcgctcatggacaattgtcaaaccatcttttttctctacatatagttgttgatagtgtgatataatcatgctatcatgttgatgcatagcatcatgggagctgataattatggctagcctgtcagtgttttcatggagtgacaattccagataagatcaagcatgctttgttgtcgtatcaaccattagtccatcacactaacgatgggctaaaatcccactttgccgaccctctttcttcattttcctgatgtaatactgtgacaagcaggatgtttcccctggttaagtccagaagcataatattgagccatgacattggttagctttgcactcatatggttgaaataattgtttcaagaattaagttttggagaaataaagcatatgcaatgtgactaatatgtgaagtcaaacaacctttaaatttcctcgaatacagttttacatgaagcaacaaagcacataaagatgggcttccacttcatgcaagattttgtctagttttatggcactactagccttggaaatttgaataaacatgttggaaataggagtatattaggagataagagcctctttattgtttatttttccaagtagcctagatacttggtatagctaggttcattgcatcttagaaagtcgtgctgtagtggtactttaatattctcttgtaaattgttttggcattaattaacttttcttgaatataaataagtccattctgttggccggagaaaatactcaacctcaagcacattcagaaaattttcctttctcattttctcacaaaataagtaatagatgtgtttgttaattctcttgagggtctttggatttgctacattttgtaatagcttggttcatatggtttatatgatctaacttgaggtggagtgtaaaaatagtaggttatagaatatacttctctctttgcgttcaatgacattgacttacacatatgtataaaggttctttccctaagatctttattttccattttattgttaataatttatcatgacacctatattgcttttacacggtgcaggtttctcaatgccatcaagcaatatctttgcttgtcattattgaagaacagtgccctgtcagcgatggccatttttcaacttcagtgttccattttcatgaacttgttatcaaaattcagatcaggcttgaaaaaagaaattggcatgttctttcccatgcttatccttcgagttctcgagaatgttcttcagcctagttttctgcaaaaaatgaccatccttaatttattggacaaaatatctcaagatcctcagattattattgacatttttgtcaactatgattgtgatgtggatgcttcaaacatatttgaaaggtatcttgcttttgtaatattttgttgctcttataccttggtagtggtcagttttcaagaacaaacatgggctaatattttaaaaagcaaaggtgataaataattttgtttgccaaaaaaaaatgatgaataaccttgttaatgcaaaatcattggattcttttttttcatttattgatagaaaaaaaggatgccttctagggtggtggatagtggttgactaactttaagcctagggagtgtcctggaattgtatgaaatgtagatttagatttggcttttgtggcggaggttttgggtgggtgtggttggtgtcaaattaggattgttgaaatactttattaaggatttggaagattaaaattagttctgttagtaataaagtataaaggaggaggattgtgcacttgtgctaggccctcgacaactaacataaaacatggatcactcacataagattttagctaatgctaagtcgttaattggaaatatcgcactgtatgactcgagtacagtgtcaaatgagctatagtcgttgcattgatgtctgaatgtagtgttaaatgagtaagagtcctcacattttcctggatggatgtgtgtgaagaagctagtttagaggtgcttgattaggtttgctacttggaaattgtaagtctatggaggtggatattggataccatgatttggaggaggattaacattatgtacctacaagagatcaagtgggttagagaaaaaagctaaggagctagataccacaggatttaaactaatacatgggaaaagttagaggaataaatggtaggctattattgtaggcaaggatttgaaagatagcgtggtggatttaaaaagaattggggacaaaatcttatccttaaaattagttgtggcataggagatcatcaatatcattagtgcttatacaccacaagtaggattggaggcacttatggaagaaaagtcttgggaagatatggaggggttggtacaaggcgttccataagaggaaaatattttcttaggcaaggatctaagtggatatgaggaaaagattttcttaggcaaggatctaagtggatatgttggtcgtgaggcaagtcaattttcaggagctcatattggtttgggttttggaggactaaatgaggaaggacaaactatttttgatttctttacgacttatgattttagattatgaaaacttgtttcaagaagctagaggaacatctaatcacttataagagtggaggttcaatgtcactgttgaaataagagaaaacaaagggatagttgagtgaaaactgtgtgtttgaatacatagcggaggcttgtttatttaggtttaatacattgattttacataaatagaggacatgttgtttcctctaaatcaaagattatgtgcctataaatcagtattatttatagagtcacaatattatattctgattttcaacactcatgttaaaataggagaaacaaaggaaaattgattgaaaaccatgtgttagagtacacaaccaatgctctattctatagtggtcattacaataaatactaacaatgagaggatattttgtttcctcaaaaccaaattctagtttcctacaaatcctactttcctactaataataaatgtatattatattctgattttcaacactcgccctcaagctaagcttactaagctctcatcatgttacaagaaaataaattattcccaataaatcaataaaatacacaaaattaagctccacctaagaacaatagtttgaaaagcaactcagggatgttgagaagatcgagataattgctagaaaaaaaaatctttgctagataagctggaaggaatgaccatcagtgagaaaattcgtggcaagcaaagcaaggttccttcttcttgaaaccacatttaaaagcttcaaaccaaaaaggttggagaccctaattatttaaactgaaggcgagatagatgcatctggggcaaagtcgttgggacaagtgcatttgggacataggcgggatcagtgcatctgggacataggcaggatcggtgtatctgggacaaagacaagggccaatacatctaggataaagacaaggccagtgcatttgaatataggaaaaaaaggaatgtcgaggaaacactcatggaataaaccgaaaaggattgggtcttgtgcgccttattttagagagcctagtgttgcaaacgacgtccggaaggtggccagatgcgctgaccttagttgctgttaggtgcgcaaagaacgtacgcgtctgtgcatctttggggatgtgtttggtgcaggcaaacagatctggggaaagtgcaccccgaggatgtactggccgacaaaaaacttgtcgaaaaaatggtcaatgaacagtggctgtcgaaaaagtgacggcgaccggaggttagaaagatcgctcgaaaaaggtgcggcaagtagaagggtccaccagggacccattgtccccggtgaggcattgttttcgtgatacccctgttaggctctggataccattttgaaataggagaaaacaaagggacagttgagtgaaaatcgtgtgtttgaatgtttatgtaggtttgattatacataaacagaggttaaccaagtttggttctgaactttgtatagatctattgatggggctttgcagtatgccactattaccagaccagaaattagattggattttctgttaacaaggtttgcccgttcatgtccaagccttctgagcagcactggatggctgtgaaaagaattctgaggtatctaaaagggactgtgtcttggggattaaaatttcaagctggttctcctaggcttcctttctctcttcatgcctattgtgctgcagattgggcatctgatcctgatgacagaaggtcaacttggagcagctatttttacttgaacctaatctcatttcctggtggtctaagaagcaatcagttgtagctagatcgagcactgaggcagaatacaggagcatggctcttattacagcagaggtaacttggattcagtctctgcttctgaactccaagttgctcataccgctcctctcattctctgtgataataccagcactgtctctcttgctcacaaccctgttcttcattctcgaactaaacatttggagcttgatctgttctttgttgggaagaaggtcatcaccaaacagattgatgttattcatgtgcctgcagcagatcaacttgctgatattctgaccaaggccctctctcctgcttcatttgttccattcagatccaagctcatagtagttgaaagaatttcttccaatccctcgtgagcttgcaggggggtataagagtattacatttactcaaatgtatttttttctttatttcagtaagctgttagtctaactaccattgttagtagttagtttgtgattagaggtcattagtgtgtaaccgctagtgacagctgtatcaactaacttaggttagttgactgttaggttgttagttgttagatcatctatataatctgtaactgtaatcagttatgacttgggttgaataacattagatttctcaatctcattctcttctcttctctcatattcactcaactctattaatttggaatgggacgtctaagaagatttggaagcttgcctgaggagtcctgagtgaattaaaaggttttggaccaagataaagaatgttggtggtggaatgaaagttttcaagactaggtaagaaacaaaagagtttgctttaaaaaccttacatgagtgcaataatgcagaaaattgggcaaggtatcaaaatactagaaatgagataagaaaaactgtgagtaaaacatgatctaaagctttaaaaggcttttgtgcaaggtggtgtcttagaggagtaatataaaactattcatttgtctaaaccttaacagcttaagattttggaattgttagtttgtaacaagttctgataaaaaatttagttatttggagtagatcgtcatgttggaggccataccttgggttttaggatcataattgtttccttgcttctttattgattcgttttcttatatggtgtacttggagcactgtctgcttccaaaagttaaagcttattcaaggtctgcagtacaaatctagtgacagattttttatttacttatgtttgtttgattttgcatcttgttttagtatttaaacacttataattctatcagatatttgcaggattgtcaatggtcttctgaaaaccgctttgggaccacctacagggtcgaccactgctttgtctccagcacaggatattactttccgacatgaatctgtgaaatgcttggtcagcattgttaagtcaatgggagcatggatggaccagcagataaggttaggagatttaggcccagcaaagagccctgaaagcagtaatgcagcagagaatcatctaatactaaatgtagaagaaggaaatgcttctgatcacgagctacattctgatgtaaattctgaattttcggatgctgccacgtttgagcaacgtcgggcatataaaatcgaacttcaggtatgtattacttggctccgaggacgacaaattgttatattgtcacaatgttaacggtaaaatatgtttttggtcccactaaaattttgaaagttcggtttaagtccctctaaatttttttgtccgtatttggtgcctctaattttgaaatgcaccacttttggtcctccaagtgctatctacatttcttttcatctctctgtaaagtgtcatctaaaccacttggaggaccaaaagtggtgcatttcaaaattagaaggaccaaaaacagacaaaaaaatttagagggactaaaaccaaactcttaaaattttagaggaaccaaaatcataatttaccctaatgttaaactatcctcttatactagcataacattgagttctaattgtttgattttacctacccaaaaacctatattgtgtttgtacaattctcttctgtatctctccttctgctcccatgaattgcatttatacataattttgtcttcctgagctgcaaattttcatattctatgctgatgcttttttttttttttttttttttttttctgggttaaatgcagaaagccatatcactttttaatcgaaaacctccaaaaggtattgaatttttgataagcaacaaaaaaattggttgttctccagaacaagtggcactgttcctgaagaacactgctggccttgatgaaaccaagattggtgactatttgggagaaagggaggagttttctctaaaagttatgcatgcttatgtagattcctttaacttcaaagggatggattttggtgaagctattcgattttttcttcagggcttcaggttgcctggtgaggcacaaaaaattgatcgcatcatggagaagtttgctgagcgctactgtaaatgcaaccctagttcttttagcagtgcagatactgcctacgttcttgcttactctgtgataatgcttaatacagatgctcataataatatggtgaaagataaggtttgaccttgctgaatcttttatattatgtcttaggctcaacagttagagtaccagctttgtgacattacttgatgtccaatctaggtgtggtttcgtttctattaggcttaattgatttttttaatagttggtacatcatattttactgatgaaatttgaatatgataattttaatcatagaaaattatcctataaaggcaatttgatttatgcgtatttattctgaatacagctttgaaaatatcaattattttctctttccatttcttttatcttcttatgtaggtggtggtagttatggtaaatcatagctttgtgtcagggaaacacagtgaacaccatgagctataacatcaacatgtaatatcattttgtaaatgatttggatatcatttgattgcttatatttgttctattgttttacaaaattgagattgtaagttcagaatatcttacaatgctgaatataggtttgacctgaatttgtggtgtatattctatgttaatggatttccagatgacaaaggctgattttgttcgaaacaaccgtggaatagatgatggaaaggatttaccagaggaatatctcggggcactttatgaccaaattgttaaaaatgaaattaaaatgaacgctgattcttctgcacctcagaataaacaagctaatagcttcaatagattgctgagattagaaggtatactcaatcttgtgaactggaagcagaatgaggaaaaagcagtgggtgcaaatgggcttctcattcagcacattcaggagcaatttaaaactaattcgcgaaaatcagagtaagccaagacatttctcaatgtttggatttttattttaggcttaaatataatttgggtatcttaaatttaggcctaatttccttttggttacccaaatttaaaagtgtttttttttcattcccctaatttggaaatagcccacttttggtccttatcacggagactaaaatgattgcaaaaaataaccttaagggccaaaagagggctattttcaaagtagggaacaaaaataatcatttttaatttgggaaaccaaaaggacaagaaatttggctcaaatttgaggaaccaaaaaaatatttaagcattatttttttatcattaattttttttggaaatgtatttggttgcaaaactagacctgctaagctctttcttttccacaattttttgtatataggctttgatttggctggctctgctacttgatatctttcaatggattttttttatctaacatttttgagaggattcagaaggtttagttaaaggaattttgaaatgagtaaagattttcctaggagggtgagccctaacacaacagtaaagttgtaccttagtgacttgttggtcatggattcgaatccggaaatagcctctttgcagatgcaagggtaaggctgcgtacaatatccctcccccttaccttcgcatagcgaggagctctgggcaatggggtacgtagttttttgttttttttttttaagattttcctaggagatgatctagttggtcacatgaatgattgtctagagtatagtagagggtaaaacatttctagattttgctttagctaacacttgttttaggtaatgggaagaacatcatatcacatactaaagtaaggtgacatgcttccaaaattgtttttttttccctctaattaggaaatcagatagaaacttttgcatggattgcaaagtcatacttggagaatacttgtttatccagcataggatcttggttatggatatataactcaagaggagagtaaatagaaatggttaagataggatttcaaggataaaatggtagcaattgaagggaaaaaaggagttttgaaagaagtgagggagggtttttggaggacatcggtcaaattatataccatgaggtatgaaaagggtgtaggagcataaaatggctcattgagttgtttaacaagattatgagattggagataatactaaatgagtagagaagtgccttattctctatattttttttttttttttgatcggcaaagataaagtataatattaatattagggcaaaagatacaagtataaaaacaaaaacaagtccatgctagcaaaaaccatagctatggtagcctaatacatagaaggcctgaattagaatatcatagcgaggatggacaaagccccccatacaagtatgataataaccttccctatacacgaaacatatccctagtattagatgaccatacatgaaacggcaagtaaaagcctttatccaaatttttacaccaccaccagcaaaagaagagggcatcatcaaacagcctatggctatcaaaccccccgctttggaaaataatactatttctgtgaccccaaatagcccctatatatgagtatgagaacaagagtgacttctaaaactggtctagttatagaaatattaagctcatgagccatattatgaaactacaagatagggtaattaagcagtcattatagaaaatgaattttgttttatgtcggggaggttacccacgaaagcaaatatacttccttcaaagattaatggaaaaacattggaggaattaatggagagacattagaggaattaaaaggacaattcatcaatttggaaaaaccatatggtggggtacgaagagaggtattgtccttcgcttaggaaatgaaaggagtttgtcctgcttgtagtcgggcaaccaaagatatgtaagatggtttcaaattagagtgtgaacataaggtgaggcgcacaaaggactttcttataactattggactgcaccaagagtgagcgtcaaacctctatctttttaacttggtcttggatgttcttatttcttactgaacatatccatgaggcagatggcataatgcatgcattttgcagatgatatgccctggttggatagttgagagaagaaataaatgagaagcaatagaggaggagacaaactttggaagcttgacttttgtttaagtagaagggaaatgaagtatataaaatgttagtttagctagaggcgcactaattctagtatggacatgaaatttggagactataacataccacaagtcataggttctatagttcaagtttcttggtcatcatacaaatgatggggaaatgtaaaccatagaattcaagtgggatggatgaaatcaaggagtgctttaggtgttatttgtgataggaaagtaccactcaagcttaagggaaaatcttactacataactataagacttgtgatgttgggcaatgaaatccaacaaggagaaaagctcaatattgtagagatgagaatgttacgatgacatacagacaagtttgtgaatgaatgcattctagagaacattggggtagcacctattgttgaaaataaaatatggtagattcttgctttaggtggtttgagcatttgtagagaagacctatataagtcccaatagttagaggtagagaaaaactaagaaaagtcttagggaaaaccgttaagaaagatttagatttaaatagtttgtatattgatatgatatatgagaggattttaccttttgattcatgagagctggccccacccggtgggaaaaggctacaactattgttgtttattgtttatatatttatgattgtgtactggctctgcatcttagatcctttccatatgtgcattttccttttcctttaaggattagctatctgctggattatagattacataagggatgttaatctttcaatgcgtttcatagtttagagtttagacattttatttaccggttattgcagatctgcgtatcatgttgtcacagatgtggctatactgaggtttatggtggaagtttgttgggggcctatgctggctgcattcagtgtaacacttgatcagagtgatgacagggtagctacttctcaatgcttacaaggatttcgacatgctgtgcatgttactgcagtgatgggtctgcagactcaaagggatgcttttgttacatctgttgccaaatttacttatctgcactgtgctggagatatgaaacagaaaaatgttgatgctgtcaaggtaagtgaatcttaatttggatgccattgacattactcaaatcaaatcactcacctttattctccttttgcatttataatgataactgcttattgcacaccatatattaatgtcattttagccatattgtacttatatcaagaaagcagtgatgaatgggttcactttgattttatttgcttaatccttcgcatgaaaatagaatgtgattggtacatttttttgtgtttatcatgtgaatgaaccacttgatttcatgtatatgtcattttagtatcttttaaatcttatttttgtgcaggcaataatatcaattgcgattgaagatggagatcatctgtatgaagcatgggaacacatattaacttgcctctcccgaattgagcatttgcaactgttaggtgagggtgccccaagtgatgcaaccttcttcacttcagctaattttgaaatggaggagaaagcactgaaaacattaagtttctcttcttttaagaaaggaacactccagaatccagccatggtggctgttgtccgtggtagttcatatgacagtacaagtattggggtcaatgcttccgcaatattaacaacagaacagataaataatttcatttcaaacttgaatctactggaccagattggaaactttgaactgaaccatgtgtttgctcatagtcaacggttgaatggagaagcaatagtagcatttgttaaagcactttgtaaagtttccatttcagagttacagtctccaacagacccccgtgtatttggcctcactaaaatagtagaaattgcgtaagtttctttgtcctttttatgatagatgttttctttgtgcaattcattcagatttcttaaataataattttcttgacatatggagcttgcacaatgaatataaaccatgcaatttacactcagacattgcccattttgttttatattccttatttgtacttttcctagtgtgttttggtatgaatatgaaatatcctagtatatgaaattatgaatacatgaccccagcaattttttctcttcctcatattgaatatggtgttgacattgtcatatgttttaggcatttagcccaatgttgtggccaagcacgaaataaagtaatgccttgccctgctacataaaacctattgcttttgatatttatcttaagaaagtggctgttatagatggaaaaagtaagaattttaagataagttcaactattgataagctcaactattatcataactcataaggaattatatggatgtaacttggatgccaagtaacctggcagattgaaggtttaggtttttggtatgttcaatctcctcggtcccgtgtttgagtgttgtgatcttcttatgctgttatattttaaatcacaaaatggtcattcaaaagaaaggaatttcttgtgactatgagctacttggcaggcaaagctcttaaggactagcaaggtagggtgttttaggactttggcagatacatatggaacaagcttggcacatatgatatatagacaccggctggaggggagtgttagaatatcttggatatttatgagatatgttaagatatcatgtatgttggaaagccaccttagttggggtcacccctagcccaccttagttgtggtggttggtagccatgggcaaagaggggtgtgttgaagttccatactggctagagatagtgttgagatatagtatataagtagggagcaatcctcaccttacaagccggttttgtagggttgagttaggcccataatccactttctaagaatgtatctattatagaactggtaaggaatcaatttagataaaatcatcttttaattttgaaaaacatatactacatcttgagaatggttttatacatccaacatttcccaagaatcatttgaggttaaagcacaaaaaatgcacaagccaatttttccttttgctgaaattcaactttatttataaatgggagcttacaaggattgaactcctaactgattggtcctggaagctctaatatcatgtcaaggaacaactgtccaaaaagcttaaaatgttacatggtggatcaagaatggttttatgtctctaactctaacatatttatgttaattgttatatcttttagaatgagggaaatgttacttgcctgaaaggggatcctttgttgattttattagaccttaagaaagggattgtgattttctcttggtcatgttctttgtagctagtaattggtgattccaagttattctcttctcatgcacatttatgattaaaattctaatgatcattcaatctacttaagactagaacatggttgcatttgcaggcattataatatgaaccgcatcagattagtatggtctcgcatatggaatgttctctcagatttctttgtgtcggttggattgtcagaaaacttgtcagttgcaatctttgcaatggactcgctgcgacaacttgcaatgaaatttttggagcgtgaggagctggctaattataacttccagaatgaatttctgagaccatttgtgattgttatgcagaaaagcaacaccacagaaattagagaattaatagttcgttgtatttcacagatggtccttagccgtgtcagtaatgtgaaatctggctggaaaagtgtttttatggtaatgttgaagttggcttgatccccccccccccccctccatccctccctccctccttgagaccatttgataaacaacaaaaattgaaactgtcaaatgttgcccaattgtttttattgaagaaagcaaaacaaattgagaaggcacatttgtgattgtttactattcttttcaagaaaaaattacattttattacttgcatacacacatttgttggcaatttagatagtctaaacaatctttcaggaatgaatattcatggtcaaattttaatacctctaaaacggcttgttaaaaaggaaataaatacaaataaaaagaaaagaaaagggacatcaaggatacatatctagtcaaactattgatggttttcaacaatctaaatgcaatacacaagtttagtgtaccagcaaattgttaatataatgacatttaccaccatgttcagctatgggcttcattaatgtccccgcttccttcctaagcaagaagaaaatgcacatctcatttgttagcatttgtgaattgagacaatggaacaatcttgacttataatgcagtgtttttgactcaggtttttacagctgctgcagctgatgagcggaagaatattgtattactagcatttgagaccatggagaaaatagtgcgtgaattttttccttatattactgagacagagacaatgaccttcaccgattgtgtccgatgccttttgacatttaccaatagccgattcaacagtgacgttagcctcaatgcaattgcgtttcttcgtttctgtgcattcagacttgctgatggaggacttgtttgcaataagaagagcagtgttgatggcccatcaattgttgtagcaaatggtatttcagatttacaatctcatactgataacggtgatcatgtctccttttggaatcctttgctatcaggtaatatgcatttagatgatatgccctaagatatttggtacagtggccaacgtaccataacggtggaccaaaaaacttattcttgtgaatcttgtccaataaatgtatgtattctgtttaattgattgattgcataaatctcaaatgtctattgctcacattcctgttgaagctgccttttatatacagtatgttaagctttgtattaagtttttgcgttaaattcttgagcaatgattgttgcattttgtcaacagatttgcttgcacttctcttgttagatgtagcaaataagtggtacctttagctcctagttagtgtcaaaaaagcaaacgtaatagtgatttaaccacattttgtgcagcagtgagataacataaattccataactcttgtctgttctttctgctttaagttaatatttttatattttcattgcagggttatcaaaactaacttctgatccaagatcagctatcagaaagagttctttggaggtgctttttaacattttgaaggatcatggtcatctattctcccacacattttggaatagcattttctgttctgttattttccctgtatataactcggtatctggaaatagagagatgaatctacaaaaggcccattgttccccttcttcagtatctgtgcatactgaaggaagcacatgggattctgagacttattcagtagcagcagaatgtttaatagatttatttgtcaccttctttgatgtggtgaggtctcagctacctggcttggtgtcagtactgacagggttcattagaagtcctgttcagggtccagctagtactggagttgctggattagtgcgtctcacaggtgaccttggtaacaggctttcagcagaagaatggaaagagatttttctatgtttgaaagatgcagctatgtcaacagtgccaggattcatgaaggtcttgagaaccatgaataatattgaggtgcctcacatttcacattcttctgctgacttagaaagttcttctgatcatgacttgaacaatgatgaatttgatgatgacaatctgcaaacggccacatatgttgtgtcaagaacgaagaaccatattgctatgcagctacttattgtacaggtttatttcttgctcgttttgtatgtgcataagttaacaattaaaacataagcactaaatttcctagtattcaatttatatgcatccactgaatttaaatcgtaatccactgattttgttttattagttttttcatgaaaacagatttaaagacatgtgtagtgcagcttgatataaatttcacctctgaatgagttcatcttgatgatatctttctgtgttctattggcaggttacaactgatctgtacaaaaagcaccagcaatccttatctgcagccagcatcaaagtccttattgaattatattcatctattgctttacatgctcgtgagatgaacagagagtcaattctactgaggaagttgcagaaagcttgctctgtcctggaaatatctggccctcccatggttcattttgaaaatgagtccttccagaatcacctcaactttctacaaaatatacatcttcatgataattttgtgcatgatgagatagagctagaacaagagttagttgctgtgtgtgaaaccgtattggacatatacctaaattgtgctggttccatttccacttttcacaagtctgataccatgccagcgcctcatggaaaactccctctgagctcagcaaagaaggaagagatagctgctaggacatctttagtcatctcagcattgcaaggattggctggtctgaaaaaggattcattcaggaggtatattccacggttctttcacttactggtagatctcgtgaggagtgaacacacctctggagaagttcaacatgccctgagtaatatgttccgttcatctgttggccaaattataatggactgagttttagttttggcatactttgtttttggacgttgctgaatatcaatcagcattttccttataagctaaagaacgagccattacatggtcatatcttgatttactcaccattgttgtgtagtgttactcttggttttttgtgattgtatgtgccattaatgtaaatgataaatttatttcaagcagaatatggaagtaccacagatagatagcgaagagacttaggcagccgctggcagtctacaacttggcctgacttgttccttttcaacaatggagattgagtcatagtggaaggagatagtttctcttaaggaaccaaaaaagtagtcttgttccttttcagatgatgtttaaggttgtgacataagaattaagatatataattaatattctttttttaagattgttacatgatttcttattatattatttatttatcttattgattaattttctacaatttattttttattgatctgtttaattccatgataaatgggtaagataattttaaaatatagataaatataaggatataattaataaaagagtaaggaaagttttgaacttttaaaatgagataaaaatgaacaaaaaaaaaattcttaataaaattgacacttgaaaaagggtagtatttgtcaaaaaggataatatttaagtaatttaaaattcttttaaattaaatagagtctattcgaatatattattgttattattgttatttgcttaactgttaccttcaggcaatgattaaaaactcaatttttttatatatatatatttttatttagaagtgtatctcttggtaccaaaaggcttccaagtttgttatcctaaggaaacttacctttctttttcttgtgtattgggcgaatggttttgagtataaacatgtatatttggtcgttttaatgatttaaaaattcctgaactaatatattgttggtaatgactgttgtatttatgtgcattatggtgatttaaaatgtttttttttttttttttttacgttggtgatttaaaatgttttaggggtaaaaatcactaaaaattcttacataatgaattttatttgcgttaatactttgatgactcttatactaatcgcgagtgattgagtttataacttttaaaattttaataaaaaattgtggcaattttagtgaatatcatttttaaattagttattttaaaatttaaaatcctacccatgttagtatcttaatgatcaaaatggattcattcataaacataaaggaggaaagcgtgatcgatcaaaattcttcattcaactagtcacattcttatttcattttacaattataatttgtgtaatttttttatagtcacaggtattaaattcttttttcgatttcaaagtattaaaaaaaatcaattattataataataagtaatatcaaatatttaaaattatgtgaataaagaataaaaaatagtaaaatacataactatcaagcaaccgtaagtataaataaaaaactttaaatacaattgtgtttcccatttttaaaaatattttgactccgttgatacaattttaaagaggagggaatctagcatttaaattccattatcacttatcaatatttgaatgatatggttttttatataaaaaaataaaattggttaaatatctttatgttttgttttgagaggagagcaataagtttatggtgagagagaaaaatatcggcatttcctcattctgcagtttggttggagttgtataatctctttgttgtccggcgcggacttcttactgtcactcgacctcgacctcgacctcgacgacggtcagttgttttcttttccatatctcgtggctttgctttcgtttcgtagtagtgtatatcctgaatcctgatcgcagaaatagtattagtaattgggatataaataaattaattagtgatggataacgaggtggaggtgctagaatttgatattgggctgggaggaggcgagggagaatatgacgatgacgacggaggaggaattgatgaggaggaattggctgtagccactggaggtggggaaatatatcttcctgagggggacctcttagatcttgaaccttgcgagggcatggaattcgagtctgaagaggctgccaaggccttctacaattcctatgcccgtcgtgttgggtttagtactcgcgtcagctcatcccgtcgttccaggcgcgatggagctattatacagaggcaatttgtttgcgcaaaggagggtttccgcaacttgaatgagaaacgcacaaaggatagagagatcaagcgcccacgtacaattacccgagtcggttgtaaagcctctctttctgtcaaaatgcaagactctggcaagtggatcgtctctggctttgttagagaacataatcacgaactcgttccaccagaccaggtgcattgccttcgctctcacaggcaaatttcaggatctgccaagacgcttatcgatactttacaggctgctgggatgggccctcgtagaattatgtctgcacttattaaagagtatggtgggattagcaaagtcggcttcacagaggtggactgtaggaattacatgaggaataataggctgagaagtttagaaggtgacattcaacttgttcttgattatttgagacagatgcatgccgaaaaccctaatttcttctatgctgtgcaaggagatgaggatcagtccatgaccaatgttttctgggctgatcccaaggctaggatgaattatacattttttggtgatactgtaacctttgacaccacataccgatctaataggtatcggttaccatttgctccctttactggtgtaaaccatcatgggcaacctgttctctttggttgtgctttcctaattaacgaatctgaagcatcatttgtgtggcttttcaagacatggcttatggccatgtctggacatccgccagtgtcaataacaactgatcatgattctgtaattcggtcagccataatacaagtcttccccgagacccgccaccgtttctgcaagtggcacatctttaaaaaatgccaggagaagttatctcatattttcctccaatatccaaattttgaagcagaatttcacaaatgtgttaacttgactgagtcgactgaggaatttgagtcttgctggtcaacacttgtagataaatatgatctcagggaccatgaatggcttcaagcaatatattcttcttgtaggcagtgggtacctgtatatttgcgagacacattctttgcagaaatgtccatcactcagcgaagtgatagcatgaactcttactttgatgggtatataaatgcttcaaccaatttaagtcagttctttaagctctatgagaaagcacttgaaagtcgcaatgagaaagaagtgagagcggattatgacacaatgaatactttgccggtattgagaaccccatctccaatggagaagcaagcatctgaactttacacgagaaaaattttcatgaggttccaggaggagttagttgggacacttacattaatggcatccaaagctgatgatgatggggaggtcattacatatcatgtagctaaatttggagaggaccataaagggtattgtgttaaattcaatgttctggagatgaaagcgacttgcagttgccaaatgtttgagttttcaggccttctttgtaggcacgttttggcagtctttagagttaccaatgtgcttactctcccatctcattatatactgaaacgttggacaagaaatgccaaaagcaatgtaatattagaagaacatgcttgtgatatatatacttactatttggaatctcatacagttagatataacaccctccggcatgaggcttttaaatttgttgatgaaggcgcgcggtctgttgaaacttatgatgttgcaatggatgctttacaagaagctgcaaaaagagtttctcagggaatgcaaaatgagggaaaaattcctatcagtaatggaaaggtaaggagtcatgtgctgaacgaggaaattcatgctaattacacaagtgggtgccaggaagaaagcttgagccagcatatgtctaaggtctgatttccatttgaaaaatgtttttaatctcttttatgatatctgtttgagtgcatttactctttcatccaccgttatatgaaaccaatcccgaaccttcacctaatagcttaaggcattatgatataaaccttgacggcttcacctaaaaccaatcttgaaatcgtaccagagctgctatgaccaagtagttaggagtttgatccctgccactttcattcttataaataaagtttaattctgtcacaagatagagaaaacctgtgcaatggccttgtctcaagccctaaggaattggtgtgagggggttagagatatataactagtcttgaaccttcatctaaccgcataagattttgagaaagttgattgttggcacaccctttttagctctcaaggtaaggctagttactttttactcttaatccttcaataacctttagttattatgagtgcttttgtagatttactgtatttaagtccagatacatacatacatatatatatatatatatatatatatatatatataatcatttgtggtattttaaataaagctctgtttccattccttgattcaaatatgaattacaggtcaaagtaataatgaagactgtacactaatttaggagtctaaattggaaacagctaaacctaacaatgaaataatctgaacagattagaatcaggagggattttatatacaaatattaatgatgttgaaagatatatagaaacttcgttactgtttcattttcttaaatttagggggatttattattcttcccctagatgtactttctcttatttctttcaaatattatattctttctgaagaaagaaaacatttattgtgtaacagattttatatcattggttttaaatatataatcattcatgcttaagtatgcttttgtttattttagtttcattgctttatgtcctgcaggatgatttggataagaatattagaaaacttatgaatgagcttgagtgtgcaaatcggaagtgtgaaatttatcgctccaacctgctttcagttttgaaagctgttgaggatcacaagttagagttgtcagttaaggtggaaaacatcaagataagcatgaaagatggcatctaaagactatggagaattaaaattgaaacagataggaaaacaaattctattttggcaatccagtcgcgcatcaataatgatcccatgacaacccgccgccccacaattgtcttgtagacctcttattatgtataaagttggtttgcagtgtattatttttttgttcagtactgtatttattatattgatgtcaacttttatagtccaagtttgctttaagaaaataataatgtagcacttatacgtcatcgtattaatatttttctgagtttaataattgcttacatagttttttcttttttaaggaattgcttacataatttttaacccgcagaaaatgaactatttgatttgcataaagtccaagtgtttcaacaactatttacaattttttaataccatatgaagaaaatattaaatgaaaaataaacatatttaatgttttagaaattaaaatgcatttaatacttttttttccctagtaagaagattaatagaaagattttgcaagagaatttagaatattcttttccattaatcatcatagattgggtgtatttagtcaataaaaattgataagaatgaatttataactcataaagacatagattcaattttttttgtccatgtaagaattttgttgataaataatatgtaagtatctctatcaacgttgactgaatcttgaggtttagtctgcttttgactttgatgaatttctgatattcaaattacaaaaatcaagtttaaattcaaatttataatcacatagccaattagatggtggtttccatgtttagtgagtgtcctaagagaaattgagaaattgcctcaaatattcatttaccaaaatcaataacattgtaggctcaatattctacaatgtaccttttcttttatactattgtggtatggtatcatggttgtaatttcttataaaaactctactcatatcttgagagtatttttaattgtcattcttcaatgaggatgtgtttacctgcttttcttactatattttttttttgttaaaaaaactatcaataattactatcacaatataaattattaatcataaatctaaaatatattttaaatgtttcaaaatatttatttattataaattttaattataatataaattatataattaaaagtatttatttattataaattttaattatatccaaaaagcatttattttttgtaatacacatgataaaatactagtgaggtgtaactttaaccgagagggtatttggtaaaggatatttttttatacccaaaatcataattcctaaaatcaagaatcctaagataataattcaattattttatatgatttaaattttttacccaatgtagatcaattgatgaggttgttaaatttaaaaagttttactctgatcttttttaatgtcttgcttagaccaaattgatccttgtgatagtttttggtactaatgatgttaaatttgattgatgtcatattttttatttttgtcatgtgtgataaactaacatatgaacctctattgtataatagagaaactttaaaggattaatgtgatttttttaaaacctgaagcaccgagattctatttaaaaaaagaaaaaaagaaaaacaaatgttgtcataaagttttcataatttttatttttatttcttatgtaaattttttgaattttagtattacttgttcagtctaaatcatttacatgtgtaaaaaaattatacagatactaacatttatttcctcatcaggaatagacacacgtgcttttttaaaaatataagtacaaaaaacattaaatttttatatggagtaaaatcaaattttgacctagggataaaaatatattttatctatttcaaaaatagtttttttacaactctattaaaatatttcttgaaatgttgcaacaataatattctgaaatgatttgttaattaatgtcctaactatttttaaataattaaaaaaataaaaaagttttttagaagtataatatttaatgtattaaaaaattaagacaatgtattaataaaaaaacattttaaaaattataatacgtatactaagtacatttattagtatttttattcttaaatttaattatttatcacataagaaaatattttaaaaaattatttattagattcctacataccttatgagaacaattttatgataaacatgaataaaaaaatattcctaagaaacaatgataaaaaaggatatgcgcttttttaagttgtctctcatcagatgacaaattattatatataataatttttttacttcgataataatcaccctaaaaatcacaccaaaatttatttttaattgattgatcatataaaatcttacactgaccgtgtatattcatcaaactcaaacgatatttcctgtaaatgttttttgtaatatatgtcaaacaatgagaaattaatatttctaacttcgtatgcctggacaacttgttgcacttcctaattccaactattttttcttctattactacactactcggaaaagatacacttgaatgaaatgctactagatttcggttgaaaagtcacagaattttattttttttatattgaaaattgcaaagtcatagtggtggtactataatattgcagtaccaaattgatccctgcaaattaaatatcggacaatacatatggctatatcaaattacaagggttctctcttgggggaactacatttactttcatcgaacataactatacacaagaactccaccgaacctttttttacgtacaaccacggaaccaacgacgtgacaagatttaacttggcgtgttaaaggcagatattatagtgccaagaaagagtcttcagcctcctaacggtgattaagtcagtgtggaatattagctgagggactgtctggtggccaaagcactgtacttaacaaaaataaataattacgtaaaggcataacatacatacaaacatggaagagaattaagtaatatcctttttaaccccaaaatgattgaaatgaagaatgattcctattcctattcctattccgtcctttaagtttcatccctggccatcctagattttccttttagatccactcattttagtatatctgattttttattattaaggaatttgcatctctgcattccacatctgaattcgtgattttccagtctgcatgccacattttaggactattctgtctgtcgtacatttgcttaacattcaatgtcaatgccatgaagcaaagttcagcaaatgcaatgaaatttacccttcaacctcccaagatattcaaaattcaaatcacaaattccaaatgcactcctaatcatcaaacctatgaggaaaattgatagaataggcctagagagtccaaaataggtgacttaaatattaaatgattcaaatattatctttttaatattattcagttttattttaaattctctaaaattagatgaggatacttgtgcggttgttattgacaaccattttaggttataaattttatccctcatttggctgagtatcaatgaagaaatatttgagtctttattttattagctctgtaactttctatagttttaatggtagattgataggagtagagtagtagctcttttgagcctataaaaaatctagttgaatcttcctgtcttgtggcaactgacatcttggtaagcatctaactattctacatattccactgacacttcatgtttaaacaaaaccctgatataaataacaaggtgtatatgtccatgcgtattagcatattatctttcctgtactgttttaattcaatcctttcaaaataagaaataaatatgaattaaaatacaaattgtatatttgaaaaaagatttgtgctcctggaagacaaaacaatttattaaaaagggatacaaataagtcattggaaaaaaaggaataaaacctgcatgttagactgatactctctgggtctataatgccaactggatatgttctttcatagatattcctcacaacaggaacatgattgaatctgcgctccttcataatcatttgagcataacgaagttccatatcaggtgtagctgtccatggcacgctgcatatttctccatttaaaaggcaaaattcagaaactaaaagctcctgtaagaagaagaaccaaataatcagatttgtgaagcaacaacaaagtagtttagttcagcagttgataccaaatatctacaaatgaaacacaattaatagaaaaggggggagggggggcttacaatatcttcaaccaattcatctacaaggcactttttaaactcggacttgtgcatcccaggttacattacaaatatagagaacctacatttgtgtaatgactgctggttttcaaacaatgattggttaaatgtgttgtatcaccgattatgtattatgataagtgtctgccaactccaattcatggtataaaattgcaagctcataattaagatacaatttcaatagcatacccatcacctattatcttaggatttatagattcacatccaattaatactaaacttggattcttgtaccttatgttttgtgcttcttgcttttgcaaatttaccatactcttgaatgtctctaagcgtcaaaaaaccgattaaagtatcatcggtatcaacaattacggcacaagattgtttctctgcaagcatgagatctattacttctataagtggtgtgcacattgaaaccgtcacatatcttgtcttcatggcttccgaaacaaatgttctccttacaaaatatgttgtttcaacattatcatcctctacacaaagtgaactttccacttgacacaaattactcaaatatgacacatcttcagcaaaggtattaccagcagatgactcaattgaactacgagaagatatttctgaaagtaaagcagaatttgagttttctaactccattttttttgcccctctgtcatctcctctttttgtctgtacagatgaaatccatgacgacaagcctacagctccaagaagtggtagaacaatccgatagtcctgtgtcaattcaaacagaagcaaaactgcagtaagtggtacttgacaaactcctgcaagagtcgctgccatcccaacctgcaaaaggaacttcaatatggtcatctatgcactaagcgtagttcacaaatttatgcattatcaacatgagacatttgtaggcagtgaataaattcttcagtatctgaaaggaatcccaagaaggctgctctggtctgttaaaggagagagagactcactatggagttatacactaatgcaaggtccattatagatagaaggtccacttcaagatattgtatgttcttgggtggaaacttggctacatggagaagcaagaagcaaagcgtaattgcaaggtcaagctcatttttgggctatagcagttctcatcccttcaattatccaaaagcatatcttcattgtctcataaaaggaatcattttcttacactatacagtgcttcagaatttcaaattgctagttattgctttcattttgttttagagtttgagcttaggacaataggacctaactaaacgccacaaaaccaacttgtaaggagaagactgcccaagacttataaggactacattgattatatctttagtcgatgtgggatctcatcacacctcgtcaagcctaggactagacatttggagcatagataatgcaggtggcccaataataccacctcctcatgcctaggaatagacatctagatcatacacagatacaagaagcccagtaacagatctaggatagactctgatattatcttaagaattttggctcaagacttctaatcaaccccacaaaaccagcttctacagggaggattgtccaaagcttttaaggaatatattgggcatatctctagtcaatgtgagatctcaacaacgttaataggtgacagttctgaaaccaacaaactgaaaacatatcattatataccatgactattgataattggaaatgcaatggataatgctatttgtaagcatgaattgaagcttatgtaaattcattccagctacttgaacacaaaataagttttatgatttcaccaaagagtaaatgctttgttcggaaatttagaggctgtatggtttgttttctattacaccatttcctcacaaaatcttgaaaataggaaaccaaatgaaaagaagctagcgtctttgaaattgttagtgaaaacatatcaagtgaaaataaaacagagcataaaccaaacacccttgaaatgtataaaaaaaaaaaaaaaaaaaaaaaaaagcaacgaaaattagcaaaagaaaaaaaaagattcaaaaattactttcctttcacttgattggatgtttacaaagtaacattattgaaacacaagcaatggacctatcctccactctcaaggaatcgaaaaattgttagaggtagactacttatcttttatttactgaaaaaactcccaagcaagagaaatacctttcatttctcttccttctttcattttactttcagcaaaaagtaatatgtattataataataaggtaagtacaagtggtactattatatttacactgttgccctactatgtgtagacctatggagccctaatacaagctgtattgcaagaattaggcatccatagatctggatttgtctagataccccttcacaaaagtaacctatagagcaatccccccctgaatacaaaacccgacccttatattcctagcccaagaatgaaaaggagccatatccagcaagaaaaaagggcatcatccatcagcttaatacattgataacctaaaatgccaacttatgcatttgacatttattgtacccatggcatccttcttttaatcagatatttaacaaaagaattttacttacagagaatagattacaggacagatgtccaagagattctcctaagataacatgcaagaactgaagagacaggactttaacatcaaactagttagcaaaccttatggtccctatctagaatcaaaattctgaaatattaaaaactcatattaggtacacacaggaaagagagttcctcttggaaatggctctttgtagacccatggtagtcatcttggaaagatataattgatcccccatgtcaaagagaagaaaaactgacgatgccaatcataaaatacgaaatggtaaaaaccatataatagccaaaatggaaagaatagtaccaggccataagcttgtggtgatgccacttccaacacagagaggttaatcgtgggattagactcagcaacagccaaactaattaattttccataagccatcccagttgcaccaccaataaagagagacggggcataataccctcccactaatccagaagccctgcacagagaagttgcaactatcttgacagctattagctgaagcaataggtcagtggaaaggcctttaacaaatggccgagattctaataaaatgtcaatattctcaaaaccccagtagaggatttcaggatatatcaatgctatcaacccaactgataagcctcccaatacagggaatgaagatcgtggaatgccagtggccttgtgcagattgtcaacaatagtcaacatatatgatgtacatctagatagggccaatgacaccagaccacataaaatacccagcaatagatacagcgggagctctgaaatcaagttgaatactctcactttaaaacttacccatcagattgagaatagcaaaatatgttcagaaagaattcagcttttgttttcttgaatttcaaaatcagcagttcaatacaatatattacccaccagtttctgtttcatagagactaaaaaacaatagagaatatacaatatcaaacctgaaattctgtaagcagtattttacaaatgaaatcatattaaactacaacagaagttttttttttttttcatttgaagtttaaaatcttgcaaaagtatgataatgccattaatttattgctctacttctgaagttctgatggtcaaaccaggagattcatgaggagtgatgctgtgcacctgtgactcttgtagatttagaagcagtcaaagattttgaatgccagcagtacagacaattcgcaaatcaattagaacaaaaacagcagcagttgccgcagcaatgttggtaataaaggaaagttttcagcagtcaaaaaggagtaattgtgaaaaagcattagtattggcttgcctagcagaagaattgtcaataatgatgaccatagtgacaagatgagcatagtcagagaccacgttgatgatgaaccgttatgtattgaagcagaaagatataagtaaaatggccatactatggaatttatgcccaagtagttcaatgatccaatatgacaccctaaaggtataatttacttgcatttggctgcttaaatcttcattgtaggagaaaagggactagcttactagaggcttccatgtattattatacttgactagatttaaccaagtttgtaaggaaatgtccaggtacagccattctgagttgtatttttgcaagataggcacagtcagttagtcaagtgcgttgttaaaccaattcagtacacatattaacacatacataaatggaaacacttcatgtattgatatactttgctgaaatttgacagggaagaaaggaacaaagcaatgaacaagagcaagagaatgaagcggtcaagtcataaataatctcaaagaaaaatgtgttgatgacttaccaccaggggaccggaagtcatactcgggaactttaaaggcaggttgagagccaaggccaatctcagaaactacagaagctatgacagcactaagtatcaccatggaagtattatttgtaagtggtaaagatgcatctgcagatgatggccacaagacagactcgacagcgaaaaaacaaccagcgaccgcagcattgaaacctgataagaaatataaattagagaagaaaataatcggatcccaggaaagtgataaaagtaacgtgtaagtgtagataccggcagagaggccagcagcagatccagcagcgagaagggagagcattctgccggaactatttccattgtcaaagaaaggacggaggcctttggcgatggaagtaccaatatcgacactgggaccctctggacccaaggaattgccggtgcctagagtaacagaagctgccatggcctttaagaaagggcgggaagcagacttgaggttggcagatggagtttggaggaaaggatcttcttggacagcggaatcaaaacgttgacgaaggaggtttagcagagacacaataacgcctccaaaagtcggaactagtactacacgtgcccatgttgtctgaataggcgcttctctcagccatgaggcgcctcgattgggaatcccatcccagaacaaatcacgaatttcatgaaccttattacatgtcatgaagttacatataagtatattatgataatagagagtatttatctatctatgtatagcataataataacaacttacagcataattgaagagcacgacagcgacgccggtgaggagaccgaccaagcatgaagatattattccggaatcgccaatccttctggtgaggagcttccattctaactctagtagttgtacttcttcctcttcctcttcctcttcctttccagccccagcttctttattatcaggcacacaacacggacgcctcgccctaattcgacacagatgagtctcgtgtgcagaagcagaaggaaacaacgaccacgaccacgaccaccaccttgttagtgttagttcttcagatttagaagcaaggattcgaactcgatcatggtgccagctggggtgaactcctactcctgctatgcatcctaagccaaccatttctcacgatattccaacttcttcccacgccacactaactcatttttccccctctaattgaaaataacttttaaaagctggaacggataaacaatagatgaattttttttgaagaatgcttacttattaaataataataatttcttaattttttcaaaatccaaattttacacttaactttttttttatcatattattcattatatctattacttgttttttctctattacttctctcttttttcacaaacaaacaaaaaattattcgatctaaccaaattaaaattgaacttatgcatatataaataattgttttttatatttataatatcactcatttacatattttttccttctatatttataatattatcacataacttgtttatgagatatatatttaattaaagataatttttgtaactaattaagtaaatttattgataagttatctagttgtgtaaatttatttttgtacatatttaaagagttatactactattaattatatattgacttataaacaagatattataatttttaatgttttttatgtttaatatgtattttattatttatttaaggcttaattaccaatttgttcactaagttatttaaatgattaagtttggtttttaaacttgcaactgctctaatcagattctctaatttttaaaaatacttagaatcgagtcatttccatcaaattaaaactaataccattaagatgagatttctagaggtttgatttaccaataaaagacgtcactatctttaattttattttaaaaataaaatatttttcccttttctgaaatcaaatctgaaacctacaaatttggaattgaatttgaaactcacaatacacaagcacaatcacaattattgtattcggaggttagagaattcgttggcggtggcatgacgagggagtctatgatggtgagatgtgtcatcgatggaattgatgcggagggaacaaccaaaggaggtggtgttgcacaatccgtcctgcacaacatacatgtgtgcgtagtttccaacgaacaacattgatgtacgcagaaagaataagcgagacagacgtgacgatagagaatgtggcgagggcattgaaggaccaccgcaccatcctcccttcagatttgaacaaaaacgcgacacttttccttcagatctgtacaaaacctcaacagtcccttcagatctaaacaaaaaccgcaccaccctccctttacatctgaacaaaaaacacatcacactctcttcgtatctgaacaaaaaatgtgcaaccttcccttggccactgtataactacaacaacccatgttgttaccatggatgaggactacgtgaacgacaatggtgttgaacgtctaacaacattagtttaattggccagaaagaatctaattgatgcatttttaaaataattttgaaattaaattaataattatttaatatgttatttaatacaatctcatccacaaatactcctaagtataacattaagagtattaacaacacattctttctaactttctaagataaataattattaattaatttttattaaaattataaaatcataaaaaatgctcattaaataacaaatgactcttaaaaaaaattatttccaaaaatttagtaaataattgagcgtgtattcaaaagaatatatcaaaaaggatattactaacatttctggtatcttaaaaaaaaaaacacttctcgtataatatttctgacgcggcaaagtactcacttcataaaaagcattgtcctcggccatcactttgaaatcagttcacatgcacaagaacctcccaaatttgctaaggttcgatcaacaaagtcacatcgctcaaactataggttttccccacttttttagaactcacaaaatttaggatggggcgagggaaggctattgaattgctaggtcagggcaacgtccttaactccaacaagagcttctagtggaatttacatctcacgcatcaagaagaataatgtagacaatcgaacgtaagcctggttctatccatgttgaatgttgagatacacacactattacagtgaactaatatgtattcgtttgctcaaggctaaacaacaatgaataaaaaaaatccagtataggaaaaacagaagacagaagtgatagttatctttgtatcttcccagcagagtgcagataaattgcaacagagacaacactgtaaacataatttaacaaacttttattcaagagaaaataaaatgggtataaagcaatttacgtgagactacaaaatgaagcattaaaagctattgccccgaggcatgcacatcaaaatgaagcatttcaaaatttaacacaagttatcattaagagccaaagccataaaagtactaaaaaaatcaacattttaatttcagttgctggtatagtatgatgtattcatgtatgtgcaatacttgggtcatggaaaagaaaaacacaacataggacacggcaagcacaatcatgatataataagcagcaacttacactgtgcccaggaagaaggcgagggagagatggaagccaaaaaggaacacagaaacaactgctgtaagaagcatcgcaactgaagtagaatacacctgtgtcaattggaaagttaatcataaatttgaattccacttcaaaggttttttgcttgagctagtaaggctgtaagggtgccataacgtttgaataaaccaagaaaaacagaagcacacatatagatcacatttgatgaaagcattcatcaatcatcataatgcagctctacttctaaatactaggcacagaataaaacttgtgtgcagttcattaagcgagctcagattctacaatcaatatatgataatgtgttcagagattgtaaatcacattctatatactcaaacacaggatttcctcatgcaattcagaaatcgtttctcccttttcaagtatgatgataagaaaagaaataaaataatatcggacagagtaaagtgatgatagaaattttaatatatttttcatttaactgtagaacctgagagcaaacatctaatgagcatcacttaagttttgtccgtaaagaatagtgggggtctacagcaaagtaacaatatcacacactctagccaacaagagatacccgcaagggcacataactctaaccccacaattttttgcataatttcatatttatattcagtatgtgtgaccatgagacatacaacaaaaagtgtatcatatgaacaaaccaataataaaaagttattgtagatgtagcatgtttaatcatatgaataattccaattataaaaaaaaaaacccataatcttaatttaaactcatgaaagtttcaaattctattaatacaactaaatggtagaaatatcataacacagtcataaacccaagtcttactttcacaatgttgtcagcatatttcattaccattgatacagcaattccactgcaaaaagaaacaaccacgtaaacacattacatcaacaagaaagtcaaaactgtaaaacaataaaataatgaaaacttctactagtatttgcttgaaaagagatattcacattttttgtgtagtgaaagagatagaaacagacacatagaaagagagaggacttgatgagttaaaggaaaatagcttaaaaatgacaacagttgaatatggaaatcaccaaagataaagttgaaataaagcctgtttcatgcaattggcacatgaaccttcccgagatttgcttattcacagtttcatcaaccatcaaaagttgtttcatctttttgtcgctcatactccacagtccacatctcaagtaacctttcatttcaggaagaaacagaagaagcatccaaacaaaggaggggaaatggttgattaatagaacaccaaaaacagaagccagtgcacgactcttatccatttcaaaagaactgagcctaagctcatacaaggatgcaaccagagaatggactgctgggagaaagctattttctgtcaacaaaaaaaaaaaaaaaaaaaatttacgccagcatgccttgcagccactccttgtattcccactctactcccaactgatatgtcaaatcagcataacaaattcccctccctgtcttgaatttggactaaagcctaagaattgtccaagcctgtataagctctacttttgccatatctatagtcgatgtgggatctcaatagactggatcccaacaactagtggtggagggagggggtgacccacaagggccatggtcacccccaagcttttaaagtgtatttatattgttaaacaaaaatctttgtccctcctagctatctaccataaaaggaaaaaaaattatctatcctgttagttgttctatttcttctcagacacgctaccctactctacctccacttggttttcttctttgagaatttggattttcctcagttcctcccgttcttcttcactcttgatcaaatcttgattcctctttatttcccataatttaatcatttgttagaatcatattgagtttcttttcattgaagtgaataacatccaaaatgaacaccatacttctatccttttaagttttaaggaaagattacaagaagacaagtaaaacccaaaatgaataaaatcaagaaacatattgtgaacccacatacaaattgtatcagttggtttaaaaactttaacaaagtagagaaagagggaaacaacggtaaatttaaatggtcgcgtatacctcttgtactcaacccaattatgtatttcttttactctaaaaagtattagttatacatataaatttcctgcatatgttatgtatgtggaatttatttatttagtttttactaagttatgttttgggtcttggccccccttaaattaaatttttggctattcccctgccaacaactagatacacaagaatagtaattagggaaaaacttccatccctcaataaattttataaagctcgtcatttacctgagtgcatggttgaaaatcatgagaactgtaatgaatgaatatccatggaagaatcccctgaataaagacataaggcatatattactgacgtgacaatttaggctttataactacaatggaaatatgattgtttataatacttggtactgacttatatgatcaaacaacatatattatgtgttattgttatgaaccttatcgtaggatcaagtcacaagcctagacatagaagacttctgtcgacctatagtgaaagaaagaagcagactcgtccttgactgagcccctcctaaactaacacaagtttttctgaatatttctccttgattaaatttcaatcaagtttgccatttaaataggctacaaaaatatccctaacaattatcctaattgatcataaatgataaaataaaaataaagagaatcctaactaataattatcccaaagaatataataaagatctgatctgaaatcaagattctgatatcaaacttattaagatgggaaaagataaaataaataattcaagatttacatacaataatcctaatttgaggccttatcagttatcccatttgatgaaaagatttacttcatatatgaacacaagaaaatagcgagcaaagatcaaaacaaactgcaaagtcaaaatctgaaagaagagatcgaattacttgttcatcaccgcatcaaaatcttgaaccaacattgcaacagcattgaaacacatgccaaagacatataaccagaagttctgaacatttatgttccgtgaaggacgcttttttataatagcctgccaaaaattatgtaagaaatctactaagccacaattgatagctaacacatcttactcgatgctatagtaatagagctcataaaccttattttaagcagactggcacatctccaatgattaatcaaatttagctcaagcattaataaattcagatagactggataaataatttcaacttaatacaaaaagcgtttgaatctaaaacaatttttaagcagaatattccatcagtcaatagtagtcaacagaacagagaataattttggctgtagattggagtggagtgccatttcatgaaacctcaagggaattaatgaaactaaaattacctcagtatatactcctgcaaaaccactcaagagagccatgacctaaaaacaaaaagttcatcatgatcagtttcaagccaaaaattcagcttatattactttatactcctaatgtgaaagcaccacaaacgttaacaactcacaattgccatcacccaaccttgaaagggagtttgaagaacatgatcagaactgaaaacacaatacaaatttttccagataaatattaaaaaaaaaaaaaaaaaaattatcaataaaatgtaaaacttctgcaataccttttgtgtgtagatcgcaggtatattcctactatttatgtatgatacaagcaaggagaagttactgtaatacacacatttttcagcagtcacacttgctaaattactaacctatcatttatggttcatttgtttgttacatctatacataaaaatttcattaacatgtttattactagagaaaatctatacaacagtcatgggaacatacaaatacacaagtgatggccacatgtcagccttaaattattcttacttcgaattcaactgggctgtagtgcacccagcagcgagtagaacaaaagcagcccactgaatctcacttaacctgaaatgtaacaagaacacaatgccaaacagcgaacaatgaattttggttatgtaatgagtccaactaaataacatttctcagtcattaagcttaaaatgattaaatatccaaaataaagaataataacaattaattatgttcatagaacatttcataacacaatgagttataaaacaagtgaaagtacgatggaaggagcttttccttctcgtttttgtccacataaaagtttggcatacagaggacccgacttgcattgatcctccactacagttctcatggcgaaaggagaattgataattttttttttttttttgcatttgaagaagagagaacaaaagacttaccttttcttaagtataattctgtataggacacccgtactgataatattaaagttctttaatatttgatagcctggagcatctacatatgcaaagatgtaatactgccgtaaattgaaaagtaaatacaatcagattcagaaagcattaacatatctgttgcaataacaaagttgtagaacaatcccattgccaccataacaaacaaccatccatcaccaacctgaagcaaatttttgacaaggtaaagtgctgctggaataggatacactataacttcatccaaggttgtagtcaacctatgtccaaggaacaatacacatcaagttatcaagttatttaaactcattctatatataacaccaacaaggggttctagctcaattggttaagcaatgtgcgtgaattgttgcgaacccagattaaaagaaaaacaccaacaagggggaaaaaataaagcttcaataaaaaagatgaagttgcaaatacataaacaccaccgggaaaattaagtgaacccattggcctactcaacactattaacaatataggttctagccttatgaactcctctccacctaaagaacactgttcagacactccccccaacacacataaaataaacaccatataaaggaatgtttgtctgtttttcaaaattaaaatatcaaaaaatagtggttttgtagtcatggggaatacagttcaaaatcacattaagacagtttttggttttaagagttaccttgtaagaccatataaccaaatgttttgattaccaagtgcaactgtgattacttgtatatgatgaagtattaaattttcaatcagattcacaaagtaaacaactaatttcttcctatgaattagccatatacaggttatttcttcagggaataaggaagcccaagagtttacaaatgcaattaacagtcaaattagtccagttctaaaaatgtcaaaaagatcggattaaaaatgttcacaaccataaataaagataaaatgcactgttaaaatgttaatatattccctgacttgcagctcttcattattgcggacatagtagtatttaagaaatctaaacaaaacaaaaaatggcatcacctgttgtcctcattgacaccgtcttttttccatattcttcccaaggccaccagggatatagcacattttaaagtctccacctataacaaaaagagtaataaagcaggtttaggtttgaagttatgaaagataataaaagtagaaataacagaatgagcgtataggatatgacgatgtgatataacctcaccataaagttagcagtagtgacactatactcatacttgccagctctcttggaccaaacgattagaatggcttgcgaactagtaagaacagtcaatgcaagtgtaacaactgacctataccaacaggcaacagggataataattaagaaatcaacaagtaagtatttcacttattatatgtgaattgttgtcatacttgcgcttccactttactttctccctgtggctgtcaattttggtttctccctcggaagtcaaatcgttatctgggactggaagagacacgaaacggatgttacattaaaacaacacaactatccattattcagcctggaggagcgatagcgataccactacctgacagcaaaaatgattttccaacgtcctcaacgtccgcatccctaacttcatcctacaacaacaatgcatcaaaatcgtactattaattgaagaaatatgcgaaaaaacactcacctcgtctttgattttcctgtattccattatatcacagagatctacgctttgtgcattggataaacagagttcaaactctaaactcttactttccttgatgcaccggcaacagatctcggcgctcaccaattatgatattataaggccacgctctctttctgatctctctttgctatgcataaacaaaagtttactatcacattaaattagacttaattatatttttttataaaaaaattatctttaataaattaatttgacgtattttattaaattttttattataaattttatttttaattttttatatttttattaattttatccttaacttttaagcttaataatggaaaaatggtcgggataatatatacaatatattataaaaaaattagaggtaaaaataacaattaagtctttaaattatttgtgtaattagatgagttttgaaaaaattgattttaaatggaagtgattttgtaaaattaattttaaaattatgtttatggttgtatattattattataaaattaagtgaggagtaaaatttagtataaatctttttatccaatacaaaagttatttaaaattgttttaattcataattaattttgaacttttttcaatgaaatcaaatatgtcaaaatttatccaaaattaaatctactcaatcaattatacaaaataaaaccaaacatacactaatgactttggtatcataaaattacacaatttttacctttttttttctttaaacatttacaataactctcttacaacacataatgatgtaatgtataaaggaatatcaatgtatattttttaaacaattaaaagatcactgcaagggtaaaaaaaagtaaggaaaatttatgtaattttataaaagtataaaaatatttgtataatttactcttattttagtaattgttgatcattttagttttccatgtttttataccactattcatctattttattttataacacttcactttattcatttaataattcattgtctaatttatttaatgtttacaaactaactttttttatcacaactagagttatgttgtttgaccacgttaaaaaatacttcataatagcattttttttaatccattaaaaaatcacattaatctatcttgttaaccattaacgtgtaaaaatggtcccgtttcatttctttcttcctagttcctactatgagctatttgtgcctttgaaaaattcattttccttcacatttcttctcaatctggtgattatcattcaaatacttttttaaatagacaacaattaactcctcttattattattatttttttgcaaatttcttcttctatttatattattgtgtgtatatatgctttggcttcatttttgtagattctatttgtgccttaggcttcatttcttcttctatttatgcttttgcaaattttctcttatttttttttatattgttgtgtgtatatatgttttggcttcatttgctttttatattgttgtatgtatatatgttttgacttcattcgcatgtatatactccatttatccttattcttatatgcagatcgaagtcgttcacttctctgtcgaaagagcgtattcttttattatagctaattacaaatctcaattagtcttgtttgtacaccaatcccaatgactaattcgactcttaagcctggaacacaatcaaaaagaaattctcttttgtctctccctcgaccaatttttacattagtgggcggacaccgccccaatcctaaaacaggaacgaatctttcaattgcagttgaccacaagataaagaaagcgattgaagcaagcattagtagtatcccccttccttcgttgtaggtccccctcccttaattatttatttagaatatccctttggctatcaactcaaagagtaaagcggtggtaagatatggatttttttgtgctaatcatattttttcttaatatatagattatttatccatgtttctcgcatgtattttttccctctaaaatcttcaaccatatttgatatttagttaggacatttcttttagtacacatgcctccttgcgtttttgtggtaaaattgttaaaagcttgctaatggcttatttttctttcttggagacatttactgattaattagtcttttctttttttgttcttttatcttttataaaaaaaaataacaagggtaaaatggaaaaatataatctttatacatagcaaaaaacacttaatattgtttgtgccataatagattatatacatcatacacttcaacacatatttcatgcatctatcttaattttgcacgtactagatttttctaacttttgcttgttttccacaatatttgtactatcatttaaaatcacaaacattcaatattacataaaagggttttaatatcggttatagaggaatttcaatatcaattttagaaccaatatttaaactgtcattgaaagtagacatttttaatgtcaaatttaaaatcgacgttgaaaatcattatctacatcggttagctgaaatcaatgtaaaaatgttgccaaaattatgtattttgaagtgttttctacatcgattctgaaaaaatcaatgttgaaaatcgtatacaacatcaattttttgcaaaatcgatgttgaatgtgttaaaccacatcgattttggccaaaatcgatgttgaatgtgcctttataacatcggttttcgatcaaaaccaatgtggtatagcacattcaacattggttttagaccaaccaatgtgatatacttaaatggttagcattgtgcacaataggagtgcccttgcactccttgcacttacatttttgttctcctaacaacagagttttacattgattgaaaaatatatgataaaaataaataacataataaaaaagtatcttaaaagaaaaaagtaaaaaaaaaaaaaataagtaaaataacgttgcacaagagataataaagcattaaagttgttatagaaagctaagtaaatataaattacaacacaaatctattgaattagtattgtcattgcttccatatgttaataacaataaacatcaagtttgtagaacctcaatatagaaaaattgttctcaatttagagacaagacaacaacttccaaaaaccacttaatgagggaaaggaagatgaagaaagagcaaatataagacgaatagcctacaaaaaaaagtgaatgctgatgaacaatgttaagcctaaaataacgttgattcagtggcaatgtcgtgtttggttagagtaggttgcactacatatgaacaggatgtacaacaagtaaattgtcaatgacatacacaggcaaaacatctgataatcctccattactaaactagagattcacaacttgtgtaacaggaaaattacaaggcaataatcagagacttcttccttgatagattatgtcaatgggaataacctaaaaataaataccaaaatttgagccactagtgtcactgagagaaagctaaacctttacgttttcacattgaataacctgagaataaataccaaattttgaattagaaataatttttttttatcaagaacaaagatgtgattaataaggcaatggtataaggatgatagagttactaatatatctgagctttacatattaacattcatagttttaggtaatattactaaaatataaggcaagtgcatatttttatccaacttctttcacaaatatttgcagcatgctagaaaataaaagaaaaatactatatagcaattagcaaagagaaaatttggatgaccttttcacaccttaaataaaacattgaccttgttaaaacaataaacgcgtgattcatcaacatttaaagagttataataaatgctttaatgaaaattgtgtggaaattaagaaacaactattttgcttttgatacgtacctacatggatttaattgtaggcatccatttgccatggcaatttaacgagctttgaattaatccattagtggtcctcaaaccttgtattagaaactggtaacttttactgatccactatcaagttgatactactaccttggaaaatacagaaacgcatctatcagcaactaggcatagtagccctttggttttagatgagacttgcacatgcatattatattacaaatgcatgacttaactcaatagcaaattgtttcaaggaacaacttcctaatctttacacaccatggtaaattgtagttgacttggtaaaattcaacttcagtgtaactctaatttttgttatcttacacattcagggacgaaaatggttatttatccataaatttatttataattatactatcacattttttttatcttatattgcttaagttcaccatcatattgtaatgtctaagttggtttcttatatgctttgacaaattataatgatttttttttcctgcatataaattttgtttatccatttctttttcctcgctaatcatggttttttgtacatatttatgcataatattataatctttcatgagttaagtcatgaacaaatcattgttatattaattttatagtacatagcatgatttgatgccatattttgccagttaagttttcaactatatagtttttacttatttttaaaaaaaaatatttatgaatggcgtccaacaaacttgttatttagaaaatatacttaatctcgttcaaatggtgtataaagtcaacttcattggagagattaatggcacgagagacttggaagttggcaataagaataaatagtatttggcatgtgcagaaatctcataaatcagcaatgatgaaaatgaatatcatggatgtgaagatggatatgaatatcatggatgtgaaggtagtcttatattgcttaagttcaaaatcaaatggaagataattgtttattgaatttaatttgttcatgacgtaggaagataaaatacaagttgcggtgaaaaaatatgatgttgaaaagtggtagtcaatactcaaggagggtaatacctatattttcttgaattttgaattcattgtaacaacaaacaatataggatttctagggatccattaaagttggtgttcacgaggagattaggggaacaatcttaaaagaaatataatcttagaatcttagaaaacaacaaattattttcaacgttttctgtacaaacctttgaaaacaaattaaaaccaaattaacagttttataaataaagggtgaaaataaaaaataaaaacagaaaacaaagctgcaagtaagcgccccctaaaattcagagattcaaagaatatattttataaatagttggtgaataaaaagacaaatgtgaatatcatgataggaatattaggatgaattttgtttttattaggtccaaatgttttttttttttttatgtttaagaccttagcatttagaagcaacattattagaccttgattaatttaacttttttcttggtacacaaaattaaagtagaatacttataaacatatatttattttctctttattttatttcaaattatttttaaattttattttcttattatatcactcatcacatctatcattttttatctctattttttcttttatactctaatccactaaaaaatgagataaacttttatatttttttactttgaatcaagtcaaataaactcacttaattaaggaggtaaaattctctgagagttcatattcttaatgaagaatatatgacttaaaaaatttagaaaatgtttttgcaatatataaaagcaaaaagtagaaagtatttgaatggagcattattacaacaaaaaacacgtgagagaagagccgacaattacattggcaaccaatgaagcatttggatctactattgaatttggcacaaaaacacctcaccaaagcgtcttggattcaatgagagagcagacaagtccagtttaaatagcaacacatcaccgaaccgaaggcaatgggtggagagagagaaatggcgaatggtgactgacccagcagaaggaataaaacaggctgtggtagagctgtaaacgttccatttcaccactcttatgatatgatatattttctccgaaaacatagctttgagcaaacagcagagcataatgtttgggtgtacaaaggcatcatcgctgccagtgtcgtcgcgttcagaggaaggaggccttcgaagacgtctttcttcgctgtctctgaagatccaagacagcccaacatggtcatttcccagatccaagtccctctcatccatgggtgactatgcaaggacatggtgggactggagctgggcctggatcctctccaggaagctcatctttgccacagatctcgaaattaacgaccaggaaacaaagctccttggctcccacaacaggggcacttggaggcatgttttctataagcttcgctctgagatcagaaggttcatctctacttctgatcacgccactcttcccaaaacctaccacagttccacccctcaactcttctcataattccctccacatttctcaatgcttccttcaaataatttactctttatttcagatccaccgtggaaagcattacgtaagccaattttatgtacaattcattcttcatgttaatttgtttcctgtactcagttaattacgtgcatattctattaattgtggattgttataattaaatttgttgcctaatggaaacaattgaacatcttatttatagggtgattgttgcatactgtattatcttatagttgtattctatggtgaatgtagaacctgccatttttctgtttcagaatcccctgccctgcccaagtaattcataaataatgattgctgaattctgaacttgttgccgtgagattgaagtttcctctcccacgtcctcctattttctcctttttcattacacatcgtctgatgccgttttacgtcgcggttataatataattaagctaacttccttccacggttccaccaccatgttaccgaacaccattattattgctttgtgtcggtgcacaatttcttcttttattttctgttttttctttctaaataacaaatatagctaaatcctacatgcaatgcttcgtttgacagttggcggtaaggaagaaaatcatgtagagaagataaatcggtgagaaacaagtaacgtaaaaacaaatatgtaagaaaatgagtgcatttttatattgtttttgtaggtatggtaaaaaaaatagaaagaaatgcttaatttttttttatatatatttgattagaaagtgtaaagaaagaaaataacgtttttgtttaacacattatttaaaaaaacataagattaaatgacaaaagtatcaaatttagtaaaaatgtacacaataatttttttatcgagaataatttttatcaatttatatgttgaatttaaagttttcataaagtataaataaatcgatactattattagattaaatatcaacaaatattcactttaatttttcttttatattatgagcttatacaaaattatcattaatataattatttaaaataattattataaaaatcaataaaatttatcatattcattttttactttggacctcaatgtccccacacatgattgttcatgatcttcttaaatagtcaccgacatggatctctccagttagaaaaaactggaaagtgccgaatttacaaatctcatcaccatttatacatattttttttaatattttatattttaaaattttcaaatattaaaataagctaatggttaagatttcatgtagttacaacaatttagttcatggatcatgaatggtcccaataaataatttttatttaataataaaagtatgagtaaatagtatataaaattagaatataaaaagtttcactttatcatctaatcatataataatatattaaatttattaattttgatgataattattttaaaaattatatcaataataatttaaaattgattgaaaatgtaagtttaggtgaatgggacatagatattaaactaaaaagtattgtgtgacctaaattaatgatggcaacccgtggaacatttgaaccagctgtcgtgtttctcaattctgtgaaaattgcaggttggtcctttgtaaaatatagggtggggaagaaattttgtgatttgggggttttgttgcttcatttgcaaaagcaacatgatatgatgtgagcatgcatatcaaagctacaaatccttatagaaggacaacttgtggagctcaactgcatcgaatagtggcagctgatgggtcgtggtagtccatgtgtgacaacccactttgtggcttgtgctacaattttaatgtctttttttttttttttttatcatggaggtgagaaagagaagggtaggaacagggcgacacaatcagcaccggcggatctacgtaattgagagtgggcagatgcatcccctcatttcaataaattactagtatttgtcttaaaatattatattttacatcccataattttatattttgcactctctaattttatgtatttgaatctccttacaagtttacatgtaagagtaagtaaatatatcatcttattttaataaaatgaaaaaaatatcatattttgcaccccataattttatattttgaaccccttaattttatgtatttgaacctccttaccagttcacatgtaaaattaagtaaatgcatcctcttattttaataaaatacaaatatttatcttaaaactttatattttgttcctcttatcttcgtgtttgaatttaactatcccatataataatgataattatcaatttttattttttaaataaattgtccccactaatcagggtcctagatccgccactaacaaccgggaaggagaattcttattgggacgatttgttattggcttactgccacgatgagagaccattattttggtccacttccctgtggatcaatttgttgcaaattcgggttcacatcgaagattgtggtacattaggatgcatgcaggattagaaggtgatagagatcgagggatagtttgttgaaataggtgagtaatagtttgttgaaatagctgtgttagtaatattgtcgaattcaccattctacttaaatttgggaggtttcataaactgactaataaaatcgattcgtaaactcataatagtttactcaatataaaaatatatattaatattcttatatataaaatcataattaaatattttaattctaaaataaatcaaaataacaaattttaacaataattcaataaactaatataattcacacccaatcaaacataaattcatatcatacaaaacataaaacataagttcttcaaataaaagcatttaaaaaacataagtaattcaaatgttcatcaatcttctaattaagtcattttcaatatcaccatcaccatcatcatcttcatctccatcatctttaagttcttcctcgattgagaagtaatcttcaacattgtcattcaaaatcaaattgtcaatatcaaatgcatctaaagttgaatcacttaaacttcttcctccaaccacatcaatattacttccactacgactttcacctagaggttgctcaacttgaacattgtcttcatcaaaaatatatatccctcttatgttatccactcatcatcacattccatatcttcaaatggaagaacaacatttttttcttatttgtctacttttcagattcaagttatacatcacataaactaagtcattcatattcttttaatgcaagcggtttctcctctttgtatgaacctataaataatataaaaaattgaagttcataacttaattaaagtataaagtctaaactaaacaaaaacaaatattaaaaaacacaaaattgtaaaatcgtacgattctaccgagtttggtctaattctaccaagtctggtccgattctagcgagtttactccgagtctaccagaaaacgattctatgtgcgattcaactcgttaggagtgtgtagactcacaaaatgtatgattttaccatttaaaactagagtttgataaccaagttttagtattggtagtcaatagaaacaaataatgataattgttcatttcaatattgatctagttttatttaattaattaatttattgatattaagaaaaataattaatttaattgataataataaatatttttttattttttttcaattctatcattatcattaatattttttttctctatttaaaattgtgccttaaaaacaagctatttttaaataaaaataattaatataataaacattataaattaaatcttaaaataaaaagaatataatatcacttataatttgaaccttataaatagaactaaacgaaacatggcctcttctaatcctagacataaacaacatataaccaaatcatcaaaataaaataaaataaaaaagtgattatattagttatctttaattaatactaacatacattcaaattgtattccaaaaatatccgtaaatgatgattagatatatttacactactcataatccaacatatttttttcaaccagtaagaataagttatattattaatatctcattaaatacatccatttcattgaaaatgagtgatatcttactaatagacctcatttattaaggatgtaaaagaaaattagccactaataatttaaaattgattatatatttcttataattaataaaaaaaaataaccatttgtttctttagccgaaggtaatatttgatcaatagttcaaacagttaacatcaaattaaattaaataactgctatttttttatttattgaagaatgtttggaccaactttttctaacacattgtttgatactaaattcatttctttttccacattaattagttcatgagaaagcgaaagagactaaaaataagtagttcatgagaaaaataagcagtacaacttattttaaaaaaactaattcacttgacattttttaaaagctaattcccccctttttcttttataaaaaaaaaaaactgcttaattttttaaagaattttactctattttaaaagcttttattttgaactttctttaaagtaagctttagctataaaaaaagctagaataatacgtatttgtttagggaaagaaaagccagctgggaaataatatgcttcagcaatgtcactttaacacaatgcatcatactccacaaaggcttcttagtacgcccaatacatcatatcatgcgtgtgaaactttacatccgtgaaatcaagtacttgaaagatcaaaatccttctactaaactatagacagaatgcccctacatgaaagcacagaaaaatagaagaccaactcgaagtagctgtaacacccaacactaaggtttacaaagcgagaaacaatttttccactcatacagcacataaatgtaacatttgatgaatcctcatgcgtgagcacccacaatcctgattgttcttccgagataggaccggtcagcaagtatgaacaattttttgtaaagatttttactttatttttctctttttggctttgctgcatacaacctgccaaaattgcattccagaatacaggaagagtgacgttaacaatgagagtaataaaaagtcaacagatattcagctaatactcgttttggcaaactgcaggatataaactatcatgcaagacacaccttgttggaattactgcttaaatctagattcaactctaaatgcattattcaagatgcagaaccaagatctatgattggaacgatatatatttacaaagatgtgcttaacgggagtcccacccccaccctaagtttggtctcggggttacatctttttatataactactactactactactactgtatataaaattgcaaaaggttcatcagccagttggctcacgcacacctccaaatgtatgcagatatgctgccttcttcagtttatacttccataactcaagctaacctaaaacctcaaaatgatttttttttcatcaggaaatcatacaccaacatattacaaagaatatgctatagacaaggcagctccatagaggaccaccaatatcctgtgggttgatagtacgactctaacatgtattccaaactgtcattaccctcttctggggagcaagaatccaatgaataactcaacttattcagtagatttgatgggccatcattagaagaataaaatcaagtctagaagtatctgctaaagaacaagcagacacaacaaaatctgggacacttcaacttcaattcaacagccatctgcacaggatgctttacaataactgatgctaaaatgtgagcagatcccaataaaatattgggtacatacgcaaatgggacctatataaattgggaaataaggcttgaaatgtcatgaagtgataactgaacttcaatcaaatcatttcgggttcttaggttcatgatgacttcttgtgtacaattatttggaactttaacttccaagagtgagaaactaacatctattgcctatatgtctattccaaccactagagatggcctaccacataatattagaagtatgttggtgattacaagacataccatttgtgatgccttttgacctctacatcttaaaaattcataagaatataaattataaagtgggcaaatagtatttcttacaggggataaaagttctattttacccaaagccaaaagtacctgtacataatgagcacaatcgtaagctattgagcacttggtgcatctctcatgcttaaattcagactgttgcgcatagtcctcctaccaattccagcgttgcctttttgcatcatggcagcaaattcaccataatcaatccttccatcctaaaacaaaagatataaacataatcatgaagcataactgcacaagaagatggtccaggaactaaattcaattcattattgataggcgacaaagaatcatgcttgacaaattattagaattcaggcatttgatatttaaagtgtatttaaggcatgatatagttttgattaattaattgtttttcacaatctgtgatcagaaaacgtttaatggatagatcaaacataggtcctaacttcctaatgcataattcttgtagctttgaaacgaaactccagttaatgcaggataaatgcaaattaatatagcttaaaacatgtaagcattctttaaccaaagaacattctatatttcaagctaaaaaccatttaagttattgaagtacatattacagaaaaattgaagactaaaagagcagtcttttaatgaggatatatattactatactgtaagatcttctaacagcctacaaggatttcctatgtgaatgtttagcacaggttaaacaacttacattatcttgatcaacttctctaataatatcttcaagaaaagcatcagtcatgttatgttctgcacaagcttgttgaagttcatcaactgtaatgtagccactaccatccttgtcaaaatattggaatgctgcaataagatgttcttcacgctctagtttgttgagatgaacagttgcagcaataaactccccataatctatggttccacttttgtccacatcagcctgaaacaactcaaaacattttagctgtgaatgaaacatgttcaaagattatttaacacgaatacaggatgtggctcaaaagaaaaatggagtaatgcctgtaaaagatgactgaatagtccctggttttcactaatgtgatgcctaatgtcaacccccggctttcgcatataaggaaatttaaaatattatatttaaaaataataactaaataaaataggaagtataaacacgaaatacaaaaaagaaacttttcgcagaaccaacaacctaccgcttccataagatcacgtatttctatatccttaagggtagacccatatcttcttagaccagctttgagttcatcgaaagtgattgcaccactgttatcagtatccatagcctgaaacatttctctcaaaccagcaatctcctcttcggatagactttcagcaatcacctaaaaaattagtataataagcaattataactacggttacatagtttcagacaagcaaaaggataatagatgaaggagaagtgaaaacaaagggcaagtgtggaagcccaataaagtgaggttcatttggcatccaagaagtgcttgactccacaaagacaacaatagcactttacatatcatgtatggaatccattatctttttcataacaacgtatgagctacattcatacatactatatttattcatcaattagcttcacttagagaacgagccctgacataacggtaaagttagatcttgatgatttgttggtcatgagttcgaattcagaaacaagctctttgcatatgtaagggtaaggctgcatataatattacaatatccctcccccttacctttacatagcgaggagtctctgggcaatgggatacaatgtttttttttttttttttttttttttttaattagcttcacttactcgcagagccatcttctttagcttattcattgcagaaaactgtttgagacgagaaagaacagcaggatccagtgatctgtcaggggcaactccattctcacatatccaaggatgacctaaacaggcaaatgacacaagtaacattgtcagacaacacattgaaacacaatattttgaatatttacaaagtttaatccttaaggaagttaagctggaacttgcttttgaggaaacatcaacatccagctaactattaatttagataggactatttcttcctgggtgagtctgctatagatgtggcaacgaccacaacgccagtgagactttaatcacctattacatctttaataatgaagataactttgaatgtatgagtagcacaggaaaagccaatttctaatgctcagtccctcaattacatctataataacatccactgagtaaccataacgacttagctactagtgcaaaagggcaaaacaactatgcttttgatatgagggtggtccttgctcatagtaattatcgttaaaaaaaaaaaaaaaaggaagaacatacataacacttgatgagcagtcaaccgttctgaaggctgagaacacagcatctttctaatcagatcttttccactgtcagatattaaaggccaaggatctgagtcaaaatctatatgtcccttcaatactgcatcaaatataccctgctgggtctctgaactccaaaaaggacaaaactttcagtgatgaaacagatgaaggacaggaaatcaaaagagtgtaggcagtaagatatacctgcccaaaatggcggcacgccactaagcaatatgtacagtatgacaccagctgtccacacatctgcttcaggcccataatgcttgaggagaacctcaggagcaacatagtacggactgccgactacatcagtgaaaacttgacctgaggcaaaggttaaatgaatatttaaacaacaataattagtattaaatggtgttccctaaaatcctaatgggaatacaaatgtatctcaataaaatattgtaatgttgttcttaaaagaagatataaagagaaaagcagagttgtttgttaccgaccgggtttgaagaaaacagagaggccaaagtcaattgctttaagagagaaatcatcatctttgttgaccaagagaaagttttcaggcttgagatctctatgcatgaccccaagggaatggcaagcctcaacaaccccaacaataattttggtcaactccgcggccttcctctcggtatagtggcccctctggatgatgcgatcaaacaactcacccccggaacaaagctccatgacaatatgaacatagagaggatcctcataagcacccttgatggtgacaatgttcttgtgaccagctaaatggtgcattatctgaatttcccttctaacgtcctcgaggtcctccttggaaatcaacttccttttggagatggatttgcaggcatattcaatggaggtagaattctcggtgcataaataagtggtgccaaattggccctgtcccaatttacgaccaagagtgtatagatcacgaatgttgggagtcttatggcctaagacataataggcttggttgtcgaggccgcggcgcatgatggcttctctcttggcgttgaagggaagattgctgttgttgttgttgttgttgttgttgttgttgttttcttgctgcttggttgaggagggatcagaatgggtggtggagtgcttggaatggtcttcgggctggctgaagccctgaatatatttccctttcaaagatccgcggcatgtgttgcccatcaaacaaaccaatttatattatatattcatccaacgatctcctctcatcagcttcttcccctctgctctgctctctctctctctctctctctctctctctctctctctttttctctctctctctctctctctgttgcgctcacctcacaaacaaatcaatccaaaaaaactattcattcatttctttcacatcacatcatctaatttcaacacccacccagacccagcagaaaagaatgcaatacaacaataaagaattacgaaataagcgtaccagaagtgaaggtgaacgacgaatggaaagaggaataactttcgcttctttcttctccgacagatctccacaaaattagtttccaaaattatttctattttttatttctggttaattttaggatgattggattggtggtggtattgtaatttttgtattggctcctgccgagaaacatcggatgttagtgctgaccagctacgcccacttctctctctctctctctctctctctgtagaattttcaattaaatatcacgcggctttctttttcatttcctttcttttttctttttggttcaattcaatgcatccgagatcaaaggggcccaaaacaagacaccaaatctttatcaaagctttagacgaaacttaccttttgattccctattttactaactacaccgtctatctaaaaattctaaattttatttccaaaaaacacctatgagtattttaaaaggtcaaaaccattcttcaccaatttttttctcagattacagcaccactccttatttcaatgcataaatgagagattaaaagcaggatgattttttaaataaaaatttgaacacttctatttaccagaattgagaatatatttagtaaaatatcaatctatattttaacgtgatatttaaagttattgcagccaagtaatggaaaatgtttcttattttcatattgattagttagcacgttgactttaggagatacagcagtcatctatgttagatattgttctaaaatcgtggaatctatttttacacaactatacaatttacatttacattttataaaggaaaaaatgtctcaaaatattctaaaatttaattttacactctttacaaattttatacgtttttaatatttatatttattaaaactgatgtatctttaatttctcattgaagactaaaaacacgtgtttttgttaaatggcaaggactaaaaacataaaaaaaaaaaactcataaggactaaaattagcatttcaatatattttaagagactaacaacttattttaactctttcaaaaaaaatattagattgggaaagaaaactaaccaatgactcgttccaacaggacatgagcaccatcatcaccattgaattctcaaacgaatttcattcatttaagaacaagatatgatttataaatctcaagtgtttatactaaaaaaacatcatgaaagttagcactaccataggtttgacaaacctctaatgtccatacttaaaggacatgcacataaagatccaaaagactttgttaaaattataatgtggccggccaatgtataggcaaggtataaaaagagatagtgagctagaaagaatagaggagaaataaggaaaataacctagggaaacaaataccaaaaaatggaagagagagaacatatcccatgaattccgccaattttgtttttaaaaattgacatttaatcaatagaataataaaaagcatttcgtaacaacactcattgtgaatggcgattctttgacatgtaagcaaatttggatgagattttaaagaaaaagggagccacagccacgggagtcattcattcacttataatctaccttttagcttagccggcacataggaataggatcggttacatcatttttcttgtcttgtcttgttttgttgagtcgaggtagttgtagacttgttttgttttacatcatttttcttttcttgtcttgttttgccgagtcgaggtagttgtagacttgttgtagtagtatatactaatactgtgccgctatgctagctacgcccaatatcaatcagttcagtgaataattttagaaaggaaagatcaccctcctgccctggccccaactttattattatacttttgttctatgtccttttatgcagtatattattcttgaaagttgaaacttccaactcaaactgattttattaggagagatgaagatggctttacgttctggatccgatctgtgaactgtgatccatcttcaatctttcagtaacaaacatgagcggagctgttcttgttgctgtggctgctgctatcggcaacttgctgcaaggatgggataatgccaccattgcaggtcatatttttattcggttagccaattaagataacattcaaccaagtctaattggctttctatgctatgcaggatctattttgtacataaagagggagtttaatttacaaagtgaacccacaatagaaggtctaattgtggccatgtcacttattggagccactgtcgttacgacatgctctggacccttatcagacttgctaggccggcgtcctatgttgatcatctcctctatcctttattttgttagttctctggtcatgctatggtctccaaatgtttacattctcctctttgcaaggcttttagatggattaggcattggtttggcagtcaccttggtacctctttacatatccgagacagctccacctgagattaggggattactaaatactcttccgcagttcactggttctgctggaatgttcttttcctactgtatggtctttgctatatcactcaccaaggccccaaactggagactcatgttgggtgttctttcaattccctctctcatttattttgcactcacactattcttcttgcctgaatctccaagatggcttgtcagcaaaggccggatgctagaggccaagaaggttttgcaacgactttgcagcagacaagatgtcgctggttggttatgcatttatttgatttgatttcatcagttcttgtttacttgcccttgatttggatggtaattgttcttggatatgatcaggtgagatggctttactagttgagggtcttggagttgggggtgataccgctatagaagagtacataattggtccagccaatgaattcagtgatgctgagcagatcaaattgtatgggacagcagaaggtcaatcctggattgccaaacctgtcactggacaaagttccattggccttgtatctcggaagggaagcatggcaaatcaaagtgctctagtggaccctctagtgaagctctttggtagtgtccatgagaagctcccagaaacaggaagcgcacttttcccacactttggaagcatgtttagtgttgggggaaatcaacctaggaatgaagattgggatgaagaaagcattgccagagagggtgatgattatgtatctgatgctgctgccgcggacgactctgatgacaatttgcagagtccattgatctcacgtcaagcaacaaatgtggaaagggacatgcctgctcctgcccagggaagcatgaggcaaggtagtcttttgcaaggagaacatgctggaaactcagggattggtggtggatggcagctagcatggaaatggtctgaaacagaaggtgttttcaagagaatatatttacaccaagaaggtggtcctggatctagacgtgggtctctcatttcacttccaggcggtgatgcgcccacactaacagatggtgagattgtccaggctgccgctctagtgagtcagtcagccctttacaacaaggagcttatgcatcagcagccagttggaccagccatgattcatccatcccaaacagctgcaaaagggccgagttggagtgacctttttgagcctggggtgaagcatgcactgattgtgggggtggggattcaaattcttcaacaggtaatgacattttttgaaacttctgttaatctaactttgatgaaattgtcagaactatttagacatattagaacattttttaaatctcaaaactcattcagtaggtgatctattcattagcccattgtacctagtaaaaagctatgtctgactgtcatctaactcctcttaaacatcgcagttctctggtataaatggggtgctctactatacacctcaaattcttgagcaggcaggtgttggttatcttctttcaaacctgggcctcggttctacttctgcgtcttttcttattagcagtgtgacaaccttgttgatgttaccctgtatagctgtggccatgaggctcatggatatatctggcagaaggtatgaatctttctcttatcattttttgttggcttctacttaaatggtaagatttgtttcaataggtggatgtatcctggagatgattttctcatggacatactgtttccattgcatattttccctgtatgttctttgctagaatattttgcaatttagggtggtattcaataacaaattgggtttgaaattactactattgcaaagtgctctcaaactaaaggaaaatgatatcaaacagtaataagatcaacgattctacatgatcagtaaatgagctgaaactaagtgtgttgtagatgagattgctgaggtgaatgagctgacaaagaaaggacaagattaggatttaggaatgtttttatatccaagggaatgttgaagttagcatctatagataggataatggaaactcgtctagtttgtgcgaagatcaatgaaggatccaatgagaaaagttgatcgaattgaagtgctctaattaaaagacaaagtaaaacttaggaaaacattaggagaagccattagaaaaaaaaagcagcttgcttttcatttcttttttttagttttggtttttgatttagctcagtggtgttgaatgatccatatacattgactccacctagtgaatatggcttggttgtggtggtcctggtggagacggtgttttgttttctattatttgtaagttcctatatgaaagtatttgcgataattctggaaattgtaacctttataatttggaaagtatttgaaagattcagaacttaaatatttgatatttgtgagttatcttctccttttgttgcttttcttaaccccttgttgtgtatatttcttcattgcttgtttttgttcattcaatctgcagtactcattggtgacatttttctatttttatttatttattcagaaccttgctgctgactacaatccccgtcttgatagtatcacttctcatattagtaatagggagtcttgtggaattggacagtactataaaagcttttatctcaacttcaagtgttattgtctatttctgttgtttcgtcatgggctttgggccaattcctaatatcctttgttcagagatcttccctactcgagttcgtggtctatgcatggctatatgtgcacttacattttggatatgtgacatcatagtcacctacacgctcccagttatgcttaattctgtgggccttggtggtgtttttggtatgtatgcggttgtttgcatcatagcttgggtgtttgtcttcttaaaagttccagaaaccaagggcatgccactggaagttatcaatgagttcttctctgtcggggcaaagcaagctcaagttgccaataagacctgactttacatacgacccattggatcttttttaatataaaattattttcaatctatggatttcttgttttgtttcctcttgaggcaccttcatcgtgggctgggatttgggatttgagaaatgagaaagtccaaaggaaactcgttagtcaataaaattataagcatctactataacattcgaatttgatttcataacccttatttattgactttataaaatgttatttactttttttttctttttttaataatacttattttagtccttagcgttagtgcaaaatattatgaagaaaatattaaaatatagtattttataaaattatagttttgtgaagttaaattttagacatacataatgtcaggaagtaaaacgagggtttatacatagaaattagataaacgttcatttttaaatcttgttttatgcggcagagatgttagggaaagtaggaatttttggtataacaaaaataggaacggaaaattttaaggtgtctaccatagaaattatagtcaatgttaaatcctttttataagaaaggtagtattttttttccttaattataaaaaacatttttaatttttgacaaaattataaaaaaaaacatataatcactttaaaatgtattaatgagtaattttcttttatatccttgattcattgtgaaatgaagatcactttttttattataaatagtgttattatatctaactaattcttaaataagttaattttatgagtattttttttcaaaaatcttgatatgaattaaaattatctaatttaactacttatattgatcttgataaattggataattatttctagtatataaataaacttggtatttgtttatatatacagagaatcgaaagtaatataatcggaaattgtgttaagtattataaatattttgaatatgttattattttaatgaattaaaaccaagcattagacacctagtcaaattaaacatcgaatctattttgacatgaaatatcaaactaattaagcacaagatcaaacttgacatcaaacaccaagccaaccaaatattaaggattcgtttggtaagagagtaaacgagaaaaaagaaaatatgactaacgaaatattttcttatgtttgtttagatagaaaatgaaaggaaaaattattttttaataaaaaatttaaaaattttcttcttttcattttctttccaattcaaattttaaaattttccttccttccttatttttcttccatctaaccaaatataagataagtcaaacttaacattgaatatttaactaaagtaagcatcgagccaaacttgacactaaacaccttgtcaaactaagcaccagatcaaactagatattgagcacctaatcaaactaagcatcagactaaatagacacctagccaaactaaggaccaaaccaaatttaatattgaacacctagccaaactaagtattggactacacttacaccaaacatcgagccaaactaagcatcggatcgcacttgacaccaaacccgatgaaaagatttaatagttaataaaatttaaaatgaaattataacaaaaaaaagtattactgattataatttaattttgatatgttgtcaatattttttttatagtgttattgttatattaataacaaaatttgatttttacatttaattatttgaaagttacatgtttctaatttgactgcagaatgtataaagcatgttacgtaacgtcaaaattaaattgtactgtattacacatgcttatagttgtgtaaacatatacgataaatataaaatagttttaaatatgagggaaaaagccattacatttttttaaaataaaatcgtatatgtttatatagttgttttagactgtacatctagaattcgacccttcaaatattatgatgttttattttcatttttgttaccaaattgatttctagtatttggaaacactttatttgagagaaaaaataaattcgaaagttttaccaagatgtaaaaaattctttaaaacatcttaatttaacatgtattaagatcatgatactaatcctttatttctttgttgtcaaattcatttcataaaaatttaaaataatcactaaatttggtgttattaatttaaccatttgaaaaaaaagaataaagtgatattttaaatttctaagtaatttgatagtaattttttttaagcaataatattataattttgtaaaagtctaatttagtaaaaacgaattgagaattaatgtgatgactacctattcgttagaagatgacctagtttaacaaaggtaaaattagataatgtttacatatacctttttcttccttcaatgttcaaatacagtaagttcaacaaaatctttaatacaaacaagggtaggaaaaagtgcacagattctttttcaaacttattcaaagaaaacagaaggaaaacgcggtaacaaataaacaatgatcgatcttcagctcatcataaaacaatggttctttgagcaaccatacatataacctaggaacgagctttcgaattgaaatccgtgatgaaagcctccatccacataaactcttagattaaccaagaaagaattagaaaacattgatagtgacatgataaagagaaatattaaggaacaatacatgctattcaaaagctaagattaactagcgtaatgaaacaagaaaagactaaaaatgacttctttttgagctttgtcaactcaagtagcaaaacaaaagcaaagaaaatctaaaacatgcttttgagttcaccataacactgacctgatctaggtcttttcataattattcatctatttaaatttccaccacccaaacagagctcccagcttggttttaatgtttctctttttattcagacctccacactagaatgctgcttcattgatcagatcaaatttcaaatacatgtgtgcggtcagcacttagggtgttacgagcaagttggaagaaatccggatcttgaaatctacaagtctctctctggcaagcataataaattagaattcagtagctgatacaaaattgtcaaccaaccatgttgtttgttaaaaacatatatacgaataagaaaaggccgtgagatgcatttaattagaaaatcacaatcaatttcaagaagcttagaaaagaaatgaatgggggttgagatgagaagaaagaagtaataatgaatttataaggtagaccttgtgaaatcataaggctagttaaaaaaagtagcaataataaagaagattagaaaaggccttggttgtcgtatgaatatcggttggagaaaagtgaagaattgggcaaaatcatatagcattaggaagaacagaagcaagtaaaagtataaaacaagcggtagagaagtgaagcgtaccatagagatagagaagagaaggttcaatttggaatgcgtctagcaccaaggcgatcaagctgcttgacatatgcagaagccttcaaattgccttcatggagaaaagcgtcaatcatgtgtttggcaatgaggtgtccaatttgctcgtcgtcaatgacggcgacggcggtagggccggcgccgctgatggtacagccaaaagcaccggcctgaatggcagccctcttgacagcctccatgccaggaatcaagggggcacgccttggctcaacgatcttgtcagaggacaatgccttccccaacccaaccacgtcgccctgcagcaccgacgccaccagagcacctgcctggctgcagttccacacgtggtgcggcatcccgatctccgtaggcagcgctgcccgcatcttcttcgtcggggcctcgaactcaggcgtcaccagcacgaaatacagctctttctccgccggaaacatcaaaggcatcaactccagcggcgagtagctaccgatcagcacaaaaccccccattatcgacggcgccacgttgtccgcgtgataccccgacaccttctcttccgatttcagtgatgccagaaccagctcctccacgcctaatttcttcccaaacagctcgttcaccgccacggcggccgcagcggcgctggcggcgctggatcccagtccgcttcccaaaggcaggcccttctccagggagagggagaggccgacggatcgaatggagagcattttcatgacttcaatggcggcgatgccggcgcagttccagagagggtttttgctgagcttgttgggggcgtggccgctgatgtcggatatgcatatctcgccagggtgaacctgtgggtccaccttcaccgacacaatgtctccgagtccgtccacggcgcagcctaggaagtcgaatcccggacccagattcgccaccgtggcgggagcaaacgctttcaccaatgtggttacaggttcgggctcccttcgaatattgactgacacgttgctgctgcagcatctgattctgaatctggccctgcctttcaaactcgccgtagacggacacaggaagcacgtcgtcgacgtcgccatctccactcttgcgggtttgtctcttccaaattataatcctaccaactacgattcaagtaatgtatttcaattaaatttaaaatttccttttttactttgtgtctttgtttgggtcattcccatgcccaaccaaaacaaaaattgttggtactttaattgggagtccatagttttgctgaaactttctaaaattaatttagaatttttaagaaatatgacgaaggttttattttaaaattaagttagtaacataatttaattttttttactcaacttaaaaattattttaaataagtattaattctaaaaccaaaatcaattttttaatctaaaatcagttaataagaattttaaggtaattttgaatgatataagatagatccaattacttttttttctttcaaaaactaatttttatctgcccatttttttaaaacaaaaacttaagatgatattaattgttattattttattaattatactcttaccattatctattttttaatatttattttatccatttattataaaataattcaatttatcgattcaattaatatgttacattatcattctaattagtattgacaaatacatcacatttttcgattaacatatttaaaacaaaaaaaaaaattgattaaaatgaaacatttcaaaaacataaaaaataaaaataaaacttttaaaattttatgtaacaaaactaaaaatattaaaacataaataatcaaaagtatcatttagcttttattcattgaaaaaatattgctatagtatgtaaccgctaaaatcaagttgtgtaaatatgcatgattaaacgaacacgtttaactataaatgtttcacactagcttgaacctagatgcaagtaaataatctgtaatattactaattaattatgagtgcttatatatcttcaccagaagcaagcagaagttttggcttcaacattaggtgagtgaggtcactaaaaatgtctggatgcgtgctgaacggagctgcaatgattagaaataccaactttttgaggggttttcttattgaattgccgtaccattgatgaaaaaaatagacaagaagcgccaggaaacatgttattccacagattagaaacaggccccagaagctctttaattgaagttgttaatcctcagtactgtgaaaaccacaagccttttctgaaagccacttttcatggatcctttgaagttctccattctcagatagggttagaatcgcagttgacatatcaattgcaagaggagtctctcgggaatgcctgccgtgacacctaagaaattaatcaaagacaagtagtaacataaagatttacaagtacatgaattgcagttgagaatcatctaggatcgagtagtactgaacttgagcaaaatttgtgctcaactaccatcaacatatatagtgttcattgtttcattcaaagaagctaaagggaagcgaagttgtgatttattgcctcccattttataaaatatcataccttctaacatcatgttttgctttctgcattagtagttagtgcaacaaagtacataaaaaaccacaccctgagaaaagtaccagtaagtaattttaaaaaatactcacaaatccccatccacttttggtgaactcctggccccttattgagaattggcagtggtttgaaaggaaaagttctacataggatcgttcatccactacagctgcaacagttccgctttcaagggcgacagcatattcttctggtgagcgaagaggaacaagtctatgtttagggatgttgagttgctcagtgagatagtttgcagcaaatgagcctacttggaaccctatacgttcactgctggatatcaagctatcaattcctgttattggtgaggacagctgttgcacagtgagaattgatgtcaagcttgcagtgtagcttgaattgattatcagaaccacaaaaggccagattatcaacacaacactaccaagtggactaactgtgttttctcctgaaacaataataaagaagcttatctgtttctagccacaaacatgaataggacatgaactgtcaaaatgggtggacaacttactgtgcgcaaagaacatggttgagaaactaaacctgcaacagcatacaaagatgagttatgaccagactagatatgtgcacaagctacaagagtacttaccaaagaactgtaactatctgttccctcggtgacccccgaaactcattgtttgttctatgttcaagaatccacaccactgctccaacaaaaaggaaaaaaaatgcagtgacacactgacaccacacatctgtggagtaaatggttgtaacatcccgggcgctgacgagcgcggggagtgatcgccggtgcagtgaggcacggacaaggagcggctcctggcaggtaccagcgggaggggtacatgaatgaatcaaatacacacccaaacgagagggatccagaggctgtgcaggtatgggactgtacagttgaggataacttaaaggatttaataggtactacctataccaacaaggtgcatctacttttcggtagcccataacataagaacttcacagttaagcgtgcttgacttggagtaattatgggattggtgacctcctgggaagtttctcaggaagtgtgtgagtgaggacaaagcacactgaaaagtcttgtgttggtatgtagggacgcaagtggccgggcgttacaagtggtatcagagcaaggcctctctaccagtacggtgtggttcgaggacgaaccaggcggaagctggtgggcatgtaacatcccgggcgctgacgagcgcggggagtgatcgccggtgcagtgaggcacggacaaggagcggctcctggcaggtaccagcgggaggggtacatgaatgaatcgaatatacacccgaacgagagggatccagaggctgtgcaggtatgggactgtacagttgaggataacttaaaggatttaataggtactacctataccaacaaggtgcatctacttttcggtagcccataacataagaacttcacagttaagcgtgcttgacttggagcaattatgggatgggtgacctcctgggaagtttcttaggaagtgtgtgagtgaggacaaagcatactgaaaagtcttgtgttggtatgtagggacagtcgttgatcctgcaagtggcagggcgttacaatggtcgcaagatgcaagtgcaaaaaaatcgatatataaaagcaagatattactacattatgtttgttctctgcagtgagcattacttacatcagaagtaatcatgttgataagatcgtagtagcttgggttcttgtgtccatctccaaacagaatgaactgttattgaactgcaaagggaagcaatttaacggcagctaggaatatatctatatgcaatatccttgaactgcattggtgccatttatttgcgagaccgtgtcttgatagctaactctgttgagaactccaattctcagttgcctcccattatttgggaaaacccatccacgaggcttttctgttgtatttcctggccatatgacaaggtttagatgctggcttgaaattgaacgattggcaggctctgcgtgaagtttctcaggggttattatagagaggccagagtaattagaccagtagccgatactcctataacctgtagcaattacattaaggatgtcatatgatggatttagaggagatctatctgaaccaaattgaataggtccagtcaatccagtcatattaatgcgcaatatgttatcaagtaactgcttccctccatcaaaaacgctcaaagcaccgaaatccagagcctcttccctcgtaccacttaagtttgtattgttagagaaggaaatggtaccattccgatcaaaaaaaaaaaaaattgagtaccttagcagtcatccaaacagaatcatatgcatagaggccgtatggatttaacccaattgagccattactgatgtgtttccaccttgagataaatgcctgtttttttctggattgaggggtgtgagggcaaaaggtaataactccttgaattgagttacaagtatctgaaggtagtgaagtagttgagtctaaaatagttgataaccaagcagtagctatccagacataccctttggtcatcattcctagcttttgagccacctcaaaaaccaacagaccagtttgcgcgaaggtgtttaagacgataacccgagactccatactcttgatcttcactaactgaccagtaacaggggatggagtggcagtcggatcaggaggcagtgctgctttgtaagacaacttacagcgtctctcagcaagtttatccccaaaacggttatcccattccgactctgatcatcgtcgctgaaccctgctatgacttctctccaaccaaaatagctaatgaggtcggcaacggcattcatgtggaagtgatcggtgggtgctgtttggagaaaataaggatactggagaggtgttagggtggggtccagagccgtggagaagagtaggggaacatggagctcatttgcgagatgcgaaagcacatgggccattactgaagattgtggaccaattatagctactgagtcggtcatcaagaacttgagggctggaagaattaggaagtaaatgaatatatataaaataaaacaagcaagcaggagcaggaagtgatacatatacatacccccaataaagccaagaaaaccactgaagttggaagcatggatggttatggacaatttacgtcccaccaggatgccaggatcggaattcacatctttctcagcagcttcgatggcaattttggaaactcgtccgtttatagttttaaaagtgaatatggcaccgattttgacgacatcatcatgtcctcttgatgctccatgtaataggatcaatgttaataatgcaacgcatagcaaattcatccagaaactatgattcataattatatatgtaatgtagaggaggtcgagagagaggctactactgctgctgtttgatttgaatgggaagtatagacagacaatatgaaggaatgtagagtgagtggtgaagagatagtgatagctttaactgtagcgggaggcaatgaaagcagaaaccccacgtcacgcgggtagagggccacgtccaacacagtaagtgggacggtgtctgagtgagcacagcaagggccattttgactgacatgaatgcaagcagattgtgacgtttcatttatcgtacttaatttcaacgtttcaagtttgtacaagaatatatctgtgtccttgctatctcgacagctttcacactttatgatgccaagaggaatttatattttctttttggaagtttatacatctttccctctgaatgcatgtatgttttggtttttcaagtgagtttgggtacaagtttccaactctttgatcctaacccagaaactttctatttaaagactaagttaggtaataatttatgaggggattacacatgtacaccaattataaaatatgattaacctaccaaacgtcatattactgttaccaacttcatcttttgctcaaggactcccaattaagcaatatccactatgaagtaattcaaatggcataacttagacgccaacaaccttggtgttttgtttgagtttttagcttcttcatattcatgcatgtaggttaaaatatgattttggtcctaatatttaagtctcttattttataaaatggaggattttgatcccataagtctcaactgacgttgacgattaaataaaaaatgctgaccattaatttgttaacgtgacactataatattaaacttttaattaatgttttgatcacgacaaaatttaatttaataaaacttaattaaaaactaaaatatataaacaatttttatttgttcagtttttttattatcttaattaattaactaaaaactatacacctttaaataaaaaataggcatgtcaccgcagtcaacgctaaacatatcagtcaatggcctgaattgatagttgaggccaaaattctcaacgtagtaaaagagagagactaaatatttttattttttataaaatataaagaattaaaattgtgaattgaataaaattagaggaataacttacatctataatttgagactgcagcctccatcccattttggttccaggcttgaaaatttggactagtcttataaatgctaattattgaacctctaacaatttctttgtttgcacattattatatttcttgttttcttttaatttttgtagattcaaccatactctactttactcgaattatttttcaaaataaagagtaggtttaaatttgtttaaatttcttaatgactaagcaaacaataaatttatagatgatgacaatttagtttactgcatttccttttaattttaaaatcctccacccaaatacaacataatttgatcagtaatctctccaataagaacttactacaaaatcagaaccaaccccagagttctgacgaaattagattgaagaggaatgctattaatttcagtcactaataattacgtgaaataagttcagttaataatgaaaattgtgttaaaaagtatattgtttacatttcactaaatttaattggacaaattaggttcaagttatacttcaccacatatatgacaaagaatcataataaaattccgctcagtaaacaacactcaaatcagatagtcatcaataccacaatctcttctacgggactatggaaaattaacaaccaacaaacaaaaaatatagacaggccttcactttcattttaagaagggaagtaagattgctggactggggacaaacctgcgcccttccctaaagaaaaagtgaggaacaaggaatacacaagattaaatacaagaaatacattacacataacaggttccagatagcaagacagacaacccactccaccagaggcaacagtcggaaagtctgaaaacagaaagaaataatgcatcgggtggaattcctaaactaaaaagcactccaattatcagatcctcgtcttggagtttcattatcagatgaagtcctaaacgggccagagccaaagggatccgagtcatcaaaagctggaaacccatgagcatggtcaaaatccacactgttgcgtactgaatcatattgttctgtcttctcccgagcaggcaaagatacactatcatgtgttctgaaggaatcaaatcttgagaagtcaaaagcagtttccaaccactcttttggcctttgcggagagctacctgagctgtaaagtggtgtgcttggaacagaatcatcaaaactgaatccactgctcctctggaagacatcaccagcctgtggtgaacctgttttgatggggtttaagtccagttccccagaatcaaagaaatagttgttcccagctctatcaagatctctctccttttaaaaaaaaaaaaatccggaaagtaatgagtagattgctagagtataaatatccattgatcaaacacgtacaagcaactcaaaatgttaaatttaagaaatatattaccaagtacattaacagaaggtgagggttcagtatttttagtcaatcttcaaatatattcaattatatatctttgggctggcagatctagcacattcagattacattatgctttctcctctgatcccatcaatcctttgcaaactggcttccatacttttttgcaaagaatgacacatctatccctttgattttaagacacaatcataaaatcttataaaagctctgaattcctactaactaaatcatcatgtcttcatattccatcacaagtatcacgtaatgtaaccatttagatctccttaacatccaagtcatattctgaacaaccacatggaggccaactaatgcttggttcgattgaaatctataaaaggaaacaaaagaccagcacaatcttcatttatctggaaaaatcctatgatagggtaccacaagaagtccaatgtaaaactctagtgataaggagtttgtattttatataataaaattgtaaaggatatgaaatggagttatcaaaaaaagatttccttacaaaataggtttgcaccaaggtcaatttagagtccaactttttatcttaggcaataaatagcgagtgaactaatagagttgtaatataactgtagtcttgcaccaagggtcaacttttcgtgcctctatcatggtattgcacatgcttattaggcacaaccaagagtcaatgtctcaattatggtaattaggcaattgctgcatataaatatccttaattatggtaattatgtaattctatgagttacataattatggaaattaggtaattattttctctttaattaaattattaaacccatagaccataatatataataatacaccccgctgtgtacactaacacatggattcaattatgtatcttactttttcttcttctcaacatcaataaacactttctacaaattatatatatgggtctgtttgtttaagctcattttttaagaaagcacttttttaataaaataagcagttttcttcttttctgatgtgtttgtctaagctactttttcttaaaataagcagtgttctgttttttttaagaagcaaatcctatctacttcttaagaagcgctttcttataaattgttttttcaagtttaaacaaaagggtctgataaaaaaaagtttaaacaaaatggcccatagtcctagttgacgagtgaagaaaagaaagaaatatagtaaacttgaattgtggaggaagactaccaaatgaaacatgatcaaggttttgtctcaaaattctgttttgaatgggcctatcttaactgcaaaagctagctcttgaaattaccattgttcaagcccttgttctactatggttgtatctatagtcgatatcggatctcaacaaatttgaggtttattcagtttaaagtttcacaataatgtgttatagataaattagaagaaatttagtgtatttgagcctttctctatatgcttttgtcaataatatcttgattctttccaaatatgcatacctcaaatgatgatttgtattaccacattgactgttctcaatagtgacaatttcctagtatgcatctttccagtaatattttccttcataggctatgtaacatcttgactatcttccagatgagcatcattctaacaatctaatcactatgttgtctctattaatgctcttttttggtcaaatgtatttaagtcattgtttgggaaccctaataacattgtgtgctttggtgagcctatcaaagtttcaagatgccgacatactaatcttcaactagggggagtgttagaatattaggaatatcattattgtgtaaagagtcttgtcatgttacttatacaacatttgttacttacttgaatattagcattcattgctgtattagaatatagtgttgggttagtgttttcaaaatattacatctcaattcagttagttacatatactccatatttcaacaaccaccagtggtcatgacaagaaagaatagtgcaggagaaatttaaacacacacacaaacacctatatatatataactggcaaacacgtgttttgaaataaaaaataatttggccaagacattaaggtgtgagaattggcatacctctttagtgaagctactagcattgaatccccaaactgaatcaatatcatcatttgtgtcaaaggttccccaatttggttcatcaaaaattttgtctccagaaaacgcagatttgacaccaccatgatcactacatatgcaagattatatgtaaattattttgcatcatcaaaagatccatactatgtgaaaatatgaaacaaaatatacattggtatctattaacactcatgtatgtcaaaatcaatttcaaaccaaatttgggaattaaagtccgtatcatgcactagaaatgttcataggacgggttgaaacaggtttagtttgatccctaaaaaaaaaaaaaaactacataccccattgctcggaggctccacgctatgcgcaggtaagggggagggaaattgtacgcaaccttacccttgcatatgcaaagaggctgtttcgggattcgaacctatgaccaacaagtcaccaagacacaactttagcttcatccttacctagttaaaaattttaatagggtcatttgatagaacctgaacctgaatgtgtgtatgctgatgatagtatcaccattcaactatgacttgtataaaaaaatatgatagtccaaaatctataaagtgatgatatacaacaatttgtgactctgttaaacacatcatatgagagatgacagttatgaatgactcttgaaaacttgctaaccgtgggtctctatcacacactcacataaaatccctttgagttgaagcatggaaatgcacaggctcatttttccttgtgctaaagttataatatgattgaaaaaaatggggcagcacaaatcaaacttttatccaaacagtaagaggctgtaaaaccatgtcaaggacaaatcttctagaagaataagttgttgggtgtagaccaaggagtctttaacgataatgccaccgtatttgtcaacatcaacatcaacatcaacagcacctttaacccaaattaattggggtctgtggtagatgaacccaatgatagattggaaaaaaagacaaagaaagagaaagggaaatgggaagaaaaaaggaaaataagacaaaagaaaggaaaaataagctaaaatagaagaaggatgaaaggaggaggggagaaatgaagaggaaaagaactaaaaactaaaaaaaaaggaacgactggaacatatacatactaatgggtttaaccctccaccaagcttatagcttttatccactccatcctaagacacatcgtccgccaatctatatcccactctattaggtcttgtttaattacctttccctgggtgagtttcggtcgacctctacctctctttgtgtcgacttcttggtaacaaacttttgttctaatgcgagcatccagtggaggagtacaacatatttgtacaacaataataataatagataagggatcgagttactataggaggagtaactctttgtaaagttactcccttcaataactctatatatcaaattttattaatccaattgttaaattaaaagttcttatttagtacatcaagtctacaattttttataaaattataaaactatttgatacttcgttaaataaatttaatttaaaatataaaatatttttgtaaaaatataagtaaatgttgagtataagattacataactacaaatatctgatttatataaaacttgatgtgtgtggtcattgaatcaatatctaaatattcaatggtaggaataataaaaattcatataaacaaaaagttatttaagacactaacaaaaacaacaacaacaatattgatgatcatattattattattaaaaataccatgaccttccaaaggcataaagaatattaatggtcagcaaaataagaggacgcctactaaatatatgatcaaatgagcaattggccagcatttgggaaactggtgaataaatcttaaaaaccatacctttgggtttcttgtatggtatcttgatcacggagtaagctatcttcaccagctgtctttctaatgtcagaatcaaaatccccatgcgggcttccgatagcactgcttgcaaatggactattgggagcactttttacagacccatcatcacttttattataaacaaatccattgccaactccctgttcattggtagtctggggcttttctgacttatcatcactcttgggagaagcagcaaatgtaggactgtcagtgctcacagcttccgcgttcacagctttcgtgttcacagctgacggcaacttttgctttggaggcgctataatgttttgcacgtcgagagtgagttctttgacaaaaacaaattctgcaagaatagtgaataacaaaatttatttagtcctttccatgataatccaaacaagaacagatgcaggtcagaaaataaacaagtatcagttaaccgttatttcaattcaatcaatatcttataatatctcttaaatatacacctatttttggaatgcattgtctcctgaactacataactgttcaaaattgatcccttgcatttagatgaacagctacacttagaaaataatgacacaacaaagtacagctaagtaaagttcatcagcaaacaaagtacttagtgtaaaagaaatatagatataagagaggtataggcaagcagagaaagtgatagaaactaaggtctgtgagtgcatagaagagagaaagcgatagaaactaaggtctgtgagtgcatagaagagaataatttacaaatagaaaaaagactggccagattctattgggtcttttgatgctgcaaccaattgtaaaacttatgagtaccaaatttcattatccctcacccattaattatttacttgccacaaaggttgcagatcagtttgcttagtcttctgatattataattttctttcagctattaaaaatgtctgtcatgagtaggcatgccttaagattcagctcttacctcaatgttgcaatttcttctctgatctgaagagatattgtctgcatttatttccttaattattatctctatattctttattttttgtatttgtggacttatcatcaattaggttgaataggttcataaaaaataggaaaaattgcaattttggtccccctttaattcttgatctgtgattttggtccccacattttagaatatccataattttagtccaatcctcaactttacatacattttatttcttttattttggcccaaaataaaccctagatctaacatattaacttaaggtactatcaagtatcaagaaataatttgattaattaaaattaaaaaataaaataaataaatgtatgcaaaattgaggattggaccaaagttgcggattttctaaaatgtggtgactaaaatcgtggaaaaaaattgggggtccaaaatcacggatcataaattaaaggggaccaatattgcaatttagcataaaaatattacataatttggtaaatttgtttatataaccctctatttcctttccctagttcattgccttccctttcctcccaactttcgaaacatatctgatgtgattactaggactaaaagtgcaaataaccaaggaagaacagtaaaaaaatgataatgcattaaatcataatgtatcacatatacatgctgtcaattttattaatgcggaagaaaatacagatggaaggatgaaaaacactaagcaaaacaagaaacaagtaatacagactttaatacttcacaaacaagttttctttttgagatcaaccccttaaattataagaatgacaaaaaaatatccttatcaaaatgcaaatgaaatccaattgagtttgatgatacagaaggtaggcagataggcatccaataagagcgtataaaataaaaatgtggtttcataaccttgtgcaaaaattcctcgtaattaatgatggatgccacataattggcacagcatttttatttttattcaattaacagattatcatatctagttagggttattttggatacctttatcttcaagcttatcccaatcttcatcccagtcagcagctccttcttggataccaggttgccagccttacaggataaaatggagtgaggctacagaatacaacaaactcgatatgcacataattattgcattattcaatataatatatactaaggggagcacatggggtttgtgggcagagcaccacaaagcaaagagaaatgatgggacccgactaaaatgagcaaaacaagaatacatgataattatatccaaaagctaacaatgcacttagcaagtaagtgaacaaaaaggaagcaagttcatttaacaaaaatgaagagacaatttgtaggctataaaaagttttctgagcttctttaggagtatacttacccggtgtaactcttccttttcttttagtcatgttgtgagtctaactatagttggtagttagactgctattagttagacagttagttaggacagctgtttgacagctgtcactaactaactcaagttagttgacagttacataactataacttttgttttcttttgccatcaagtgggtttctctagcttgatctttggcaccttaattcaggttttatcatgtattaggttgccaaagctttgttaggcttactgatggccttttctttctttttcagtacttcttgtacttcttttcatatatataatatattatctttgctgataaaaaaaaaaatataaactgtattgttctcagtttctgtttgggttgaatacaatattctttcacctcaatttagttctctctcagttttactttcagattcatttagcttcattaaaatcatgatagataaatgcaatcatacagatacagaaagccaacaactaaagttttttgtcagagcaatataaataaataagcattacttaatagaacaccaccaatatcaattaaatcaaatgtattgaagatggaaatgcatagcatttcttgcatactgttctcagaaacatcagagagtttcaagtttcccttcttttcataaaatcaatgcattaacccaacatttgatagcaagtacagtagcaactactacaaagaaccatataattatataagcatcaatacaaagcatcatcatatttcttagaatgtgggtttggccctaactcaaccccaaaagctagctcatagggtgagggttgttccccacttatatactctatcttgatgctatctctagccgatgtgggacttgggttttccccaatacatcccctcacgcccagcacttttgggcttggtacgtggataatatggtgggtagcccgttaatggatctaagataagctctgatgccatctaagaatgtgggtttggacctaactcaaccccaaaagctagctcatagggtgagggttgttccccacttatatactctatcttgacactatctctagctgatgtgggacttgggttttccccaataatattgtatagtaaattgattccctaaaaaaattgcacaagagaaaacattcatgataaggagcatttcctaaactttatatattaaatgccacttgattaggttatacagtttattctgattttatgtaacctttaactgattgtttacaaagcatcatcatatggtattttatagagcttgtcaaacagagctttgcaacaaaatcagttaaaaattacataaaatcagaataaactgtatatatttaatgccacttgattaagcaacctgtatcaaatttcactggcagaaataattttactgctgattcaaaactagtaattcagcaactgaaggccagttcctcaaattacaaaacaaagctgatatctaaaacaaatgcactaaataccatataacgaaatcaaagacacgaaaaagatttgagaaggactggaagtatataacaacaccaattataaatttgaatttaccaaagggtagctccaataatgtagtgggtttagcacgtaatccatatttcttgcatcgctcattcagagatttcaccagctcatcaaggtctgtttgaatacgatcaacatgagcctgaaaatttcagatgactaaatgagatacataagttgatcacaatttctcaacatggatgcacaaacctggtaatattaaaatgtacctgcagagttgcatcaccttttccatcctgttccatcttgacaattgcttggtacaattcaatttttttctcctacacaaaaaaaaaaaataaaaaaaaatcatttgacagcaatgaagcaaaacaggtaaaaaaaaaataacaaactttttagcatatatgcttataagctatcaattgaagataaagccatatttcattgcacctgtatgtcacgaaacgtggcttcctcagtagttaacttggatgataaatctcctacttgcttatatttatcttcatatttctttgctaaaatgtcaacctgaaattcatatattgagcaaataataaatattatgattattgaggtaataaaaacacatgcaattctaaagaaagatacctcatgcttatcagcagctatcctttctatgacctcattaagacgattgtcacatctgcttttgtacagaaccttttattggcaaaagaacaagtaatttgtttaaaaaaggtgaaaagaaaaagaaacgatgaatattaagtattaacctgacactgacactattaaccatacgaacaaaatggaagatagcttttatatgctttactcttctaggtatccacaatttcatagtacaaaagggttacaaaagaacatgtctgtttcataggcttttttttttccagtagttcctaggtatctgcagaagcagacaaaagctgaaagaaaagggatagcatctattaatgcataacaattaagtaaaagacctttccaagagaccctttttcacttccttaaaattaataggacaggaaacccaagaggcagacaggtgatatgtaattatgttcagcagatctatagtaaaaaatgattagtttggttaacaaatctggatattgacaataagaacaaagccatgggatgtaggaatatgttcttatatatacttaaaacaatctgcatatattttgcacccttaaagctttgacagtaaaatctctttgtaagaatgtaagatgcattcttcctaaagtacaataaatcatgatggtgaacaattttttgaccaaaatacatttcacaattactactactagctacatcagtacatctatatggtatatagctcatcctgcaaatcaagatacagtataaatgtacacaaatcaaatgttaatctgttaagcatattctaaaataaatctaaagcttggacagctaggcaaggcgaaccctgtacagtaaaagtttcagctattattgatccagttgccacctcttcaccatgtttggatgacataaaagagactaaaacagtacaaaaagaactcagataaaccagactagagttttaaacctcttttatttaagcttcttttatttttttgaagaaaaagtgctttttaattaaaatggcatcttaaaagaatttacaatgattatattattgtaaattttcaaaaaagaaaaacttcaaaaatgctgctctagtggttttctcagaagcaaaaaagagtaacttctgaaagaaagctctaaaacaatgcatcacagaaccactttttctatacacaggccttaataaaatacaaaggaagtaagcaaggaaaacactcacaagttcctgcatttttgcacggtaaaattctattttctctctggactccttaatttccttctcaagttcttccacctgcatttaacaaagaaaatgaagagatgagaattgactatgttcaattgaaccacaagaattttatcaagcatacatggaccgcaataatgatatgcttcatgcaaatgacaatctacaatatgatctttccacgctatcttcaaagataccagtaacagctaataatttttgtagctgtaagtttcaatcatcagccaaaaagagtaagcatgcttcatgactgaaaccaaaaataacttaatgtcatcacaccacatcctcaaattaattgacctgaaaagattatcatagaggacacattccccatatttgtgatcgcaaagaacctactaagctgaaaggtaacttttatcttattcctatattactgaatatactctatctagagtagtgaatgttgaactttaaagggacaataaaagaaaaaagtgagagtaaaagaaatgataatattaaaggatgtgaccacagaaaaaagaacagaatatggaatgattgtatatgagattatgaggagatattaatgtaacatttatcaaggaaaaaatgacagaaaatttgttaaggtggtttagacatgtaaagaaagtcgctgaaggcaccagtgaagagagtagatcgcatgacttttagccctataaaaagtgcaacagcagaaatgattcaaaaaataaataaaagcaccttcttatcagcttctgttgcttcttgaaactttgaattaattgaattttgctcatctgaactcagctgattaatgaggtgcctctccaagactggaattctagatttctgcggcttgttctgaggtccttcatccgactgagagacagcagccggccttggtggccgacctgcagcagggttcacttgtcgagcaccagaaccagttgtccctggttgttgttgaaaagcttcaaaagataaaagggggcagagacacaaaaataagagaaaaatataaatttatcatttatctgaagggttatatcagtaataatctacaatagtggtattgtagtagtagtagtagtaaaataaaacctgctaattcttgggcacacacctgatggatttccccaactactatagtgagcagcaggttgaccagtagttggtaaatcaagcacaatgttacttggaagtacagctggaagaacgcatccttccctgtgtcgctccattaggtacaatgcaatacaaaactccctgagagaaagcatgctatcattatcttgatccgataagtcccagacctgctttaaaacctctgaaaaatataaaacatggcataaacataatgttcaagaaattagctagccatgaaaagtaatacacatggaggatgtgaaaactaaatagaaccccccaccccaaacagacacaaaaaactgctatcaaatccaacttagttcggaaatatgtttaattaatcatatttgagttgatttcctaatgcatgtagagctagaacactagagaagtagaaaaatatatatagcgttttaagccaactgtccaaacaaaaaggcaaggaagtagaagaaaaatacctcttggtaatctccaactaagaaacaagttccgcgcttgttccccagtgattttaccatctctatctgtgtctacttccatgaatactttcatatatttctggacatcagtttgagtcatccttggccatggagcttgggattgactggaagcagaatcctgtaatctccctggaagtccagatgaattcggcatattatgcgtctggagtgaggcatgctggtcctgttttaccaccagctgggcttgctgaagctttgcaccaacaggctgggttgcaagtgagcgctgcaaagaatcaggagtactagtcctagtagaatgctggtttcctccagatacaggaacaatagctgaagaaagcgctgaagtgccagaagaaaatccttgtggagaagaagcttgcttgggctgaaatgagctagctgagaataaatctcctccaaaaaatgaatcggaagaattaccgttaacagaagtatccactggtttagaatccttaaccaattgatctgatgactttatgggggaggcaggatattggccaggtggccgtgccacatttgatccaaacccaaacccctcctgcgttgatgggggactagttcctctaactgctactggagagaaagttacttctggagttccacccatcttgccataactggaaatgccgggggtttcagggcgagccattccttgagtggcaacagcagctggaggcctcgcaaactgatttccctgagaagggagggtttgctggttaccactcaaatttgaaactgccccccttggtccaagattttggtgggataaaggactaacaggaccaatctgtggcgcaggtccaggtgcaggtgcaggcgcaggcgcaggtgcaggtggagatactgtggcactgaaattaatctgaggagcaggaatcttagatgcagccgggccatacaatgctgcttttaccatttcgggagttagttcccgcttactctgtgccacagtaacaagcttaagggcattgtaaaactctgcccgcccaaggaaaccactctggctttggtttgcaaatgcccaaatctgcagacacacagacaggtcggtgtgatttctcaagtatttagcatttagacgaacagatttctaatgcagtgactaactaattcaaaaaaaacaatgctctgaaatgcttggtggcacttgatgtgaagtaaatcaaataataagcagaatttgaattagaatagagggagagagacctgcgcaagaacatgtttgggcaaaccggagccctggaagaaggagacggcttcggcaccgctgatacggccgtctcgatccaaatctgcacggcgaaaataggcatcgaagagatcgacattaggcgctgccgatgccattgcagaattcaacagcaccgcctgatttcaatagattccacacttttttagttctcctttgccttttcagatcacaccatgtatttaattgtgattcataaaagctcaacaaacatcaaatttcgtaccccaaagattgattaaccgcttgatttgcactttgcttgcctccaatcgaatccgatcaacacactcacccaccaacaaaattacagatcatccctcgattctcatttttcgcccaacggacaattttaatgctctttactgtctgaatttcaaaaataccacccctcgtcacatttttggggagaccctcgccaactgcgactatttctaagtttttttttttatgtaattaaagtttatatttataataatacataaaaaaatataaattatattttaatttttattcatgattttaggtcattttttattatcaaaaataagtattttattttgtattggatcatcctgtttgacttatcctagaaaccaatttgctcacttaagtatttatggtcgctcaatacttggaaaattttggatcatcttaactaactcgttattgagtttatcttaatcacggacttgtgtcctaggtcatgagagaaaaaaataacattatcataatcactttatttctcaaccaatttagatactccaaaaagttagtcttgtatttatattagatacttaaattgttgaaacatgatgacataatcacgaaagtgtatgtcttgatatgtaagacatacacaactacatctggtacatggggggacaagaccgagcccatgccagagagtgaggatgaaagatttgtgagagtctcctacgagtcgtccgacggaaaagactttatgaatggagtaaaagaacttgggatcgtcgatcttttccttaaagattgggatgagtcgatgtcgatcgatggtgtgaaaacctcaaatccaaatatatccttttttggatattgtaagtcactcttcattctagaaatcaattttcaaaaacactcttcatgatacccttttcaaagcaccctgctatcatccaaaaagtttttgttagcaaatgtcatttagtcacttttgatatgtatcttcaattatagctatattaggattttgaatgtggaggatagtggaacgaaacatggtgaattggaaaacaattacaattgaaaatggagtttattagtaaaaatgagaaggtgtgaatatcatttctcttgttatattttcttagactatcggggtcgaaaacctttagcatgttttcttcatttatttctcggccttttctttttaggtcattttttcccccaacacagcccccttttttcaattttcaaaatatcaaaattatccttccctttttttgaaataaaaaatcacgcctcttctctcatctcacataccttgtcaattaaaaatgaaaaaaaaaattataaataacctaacaattttgaatttcgtaatatctcaaaatttataaaatgctcttttctaaatagttgataaatctaaaaatgaattttgattttaatgcatacgaaaattcataaaatttattttaaatttcaatcattgacaaaaatatcagaacatataaatgtaaaaaacttaaatcagaacataaaggatagagaaaaatattttttatttgttaaattattcaattttaaattactacaatacacttaaaattaattagttagaataactaaaagagtgattttttgtcctaatttttgttgtagcatgttaatacacaccaactcaaaattacaataaatagagtttttttttaagaggctacaatagatagagttaaaacctttttttttaatgaagatagagtttaaactcaataactataaacagcataaaaatcaaatatgctttttttttaagaaaaaaaatcaaatatttaatacaatattcacaatagacaatgaacccctcaattttacacacacacatatatatatatatatatatcattaaatatttataaaaatctaatttttttacatacttggttttttccctataaactcaagcatattattaataatcgactgcgaaatataatgacgaacataatagataaactttagattagtgcatgacgtagatgctcatgcaagaacataagtcaatacattagcatgtcttttcacaaacttgactctaaagtttgaaaataatgaacggatttgtctaccctcatctaggttgtctccaaattcagaaaaatcaagatgtaagttatgagagagattgtttaaatttaaaaaaaattaaaataaataattttaaaaaatgtaagtttttaataaataaatatgatttgtttcttaaatatttataaaaagtacttttgtctaattagacacagttatttattttaataattttttaaaatattttatttgtcacattagacaaaagttaaggtgtttttttatgaagagcaactaaaactaagttttatataaaatatagagattaaattgaatgatataaaactttgaagaaaaaaaaattcataaaaagtataaagactatttttttattttaaaaaagttcttaatttgtttcccttaaatcattcatcccattcacacagaacttaataaacttttctttagtatagagacatctaaattctataattattacttaaagatagttttatcgacttttttagcccaaaattgtagagcaattgttctttgggaaagaaaacatgtgcagtggaatttaattgagttattgggttgagttggatttttttagtgcaccaaattagattgggttaggtaatggatttataagttttaaattccatcaaatccaaccaaccagactatataaataaatatataataaaaattagtaattatctaatttttttatatgtattgtatgtaagagattatgagtaataaaaagtaaaaagattccaaatcatcactcttgttcactcgcaggccatgatagtttattttgattttggagattgactcaaactaataattgagttgtaaaacaattttagaatactaattgtgaattataaaataatgaagtaatgaatattaattgttatattataatgattaattaagaagcaatgaaaaaatattaggtccggttgaggatggttgtgagtttgccattttcgattttaaaatataatttgaaaactgaaacgtgtttggataaaatggttgccagttgaattttttcttcttttcaaaacagatttcaaattatttcaaaaaataacaaaattaggtttgtggattttagttattgatttatcctaacccctcttccccctcaagtgctctatttctccctctgttgttcatctctcttccgcacagaccaacaaaatctccctctcctccacacagagaccagcaacaccaccactgaactcgcctctgccacctccccaatcctcagcttcaccaccagaacacgcgtagcgccccctgcatccactgtatccccatcttcaccaccattccccaatcctttatccccgcgtcgactcggaaaatccttcatggaacgtacgagcttctgcgcagccttcccgagttcccgtcacaacgaaaatccttcgagtaatttacactccattgtacagaaattacatttaaaatacaaaagtgtgggggaaaattaagcgaactgggtttaaaaaaagactggataaaaagtatttttttttttaaagcctttcaaatttaggcacgaattttttggcttccaacctgagcttaattaatttacattattaatttaataattaagacaaaataaggaaaacatgaaagaatttttttattcgcaacttgtacggaggatttgataataccgagcagttatatttctacataaacttcataataaaaaaactcatacaataaataaatacagtagataagaagaaaagagagagaaaatgacattaattttaagtcttgaccaaaatcaaattgtttaaagaggtcaataacaattataataacacagctttccctaggatgcaaattagtaattagttattctattcctatgctacttttgattcaagtgtaggcattctacttaagtaatcgaattcaggtgtgagctgtcgaaaactcgtctattaattatattcaacggcatcataactctggtagaaattcgtaagagtgtgagactatttcagacggggagaagggatatgggtttctgtgacacagttttatggttgatgtaaactaaacgcgggagattgggttaatttattagaattatgaaaatgactttggtctgatttgactaaatcctctctccccacgccaaaccaagctacgaaagttgactaggataacaagtgtaggctggcagcaattacctgcgaaggagtgagcctctttcccacgttgaactcactgaccctgacccacttcaggggtggatctagaaaataaattaaggggggcactttaaccttgcaaaaaataattttatgttcatagatttagtggcggggagttgcccccaaaattttttttaaaaaaaatttaaatcaatattttatgtacaaggttatgaacccgcttaaaattatattatatatatgtatataactaaaattatttgattaagaaaattcatccataattctatattgaaaaatccaaaataacaattgaatttgataatacaagtaaaatatattaataataaaaaagactgtaaatagcaactacctaaattaaaactcaaaagcttatttcaaaaatgtaatatgaaactgcagaaaaaaaagtgggtacagaaagcaaattagacccaaataagacaaagctagcttctcctattcttcttcttagttggtgtctgcggcactttctttctagtttccatttctgttcttataagttgatttctctttctcttcaacgaaaatttaaggggagacactgcccaatttcaccgctgtttcaccattccaacaggggtattataacttgatcccaaaaatttaagggggccacatgtgacttaatatgtcaatacaacaacaattaataaatcatccttccattaaagttttgccttttactgtaccatacacatttcctataggctcttcaaagctaaattcaattattgaaggcaaagaaaaagagagaagaccaaaggcaggtgtggaaggaagaagaaagctttcatcgaccggtgttcaactttaaacactgaggaagagccacaaaattattctttctgcagggtgcaaggtacagcttcaatgggaaattgctggggttctccacctcacaacccaaccccaataactaccggtaaccttagtacaggttggttgggttgttttgttctttggtctcaattcatttgatttctcatgtgttcatttaatttatgatttcccatgtgcaggtacgacggggacatctcaggcgatcagcagcggcagctatactactactacgactactacttcttctggaagtgggagcagctccataaatagcaagttctcagtgtcaagcggtggtcagccttatccaaatggacagatcttacctacctccaatttgaggatcttcacttttgccgagttgaaggctgcgactagaaatttcagagctgatacagtgcttggggagggaggttttggaaaagtctacaagggttggcttgaagaaaaggccacgtcaaagggtggaagcggaacagtaattgccgtaaaaaaactcaactctgaaagcttacaaggacttgaagagtggcaggtaatccttcataataatcaaaccgcttttactttatttacttctacatatccttttgttacttaatgtactccgctagctatgagcagcccctgtccccagaagaagatattttatgcacaaaaactttttggtagtatcacccttctccagcccagtttcaagcaataatttggaacaagaattagaattttgaaactcaaataataaccgtcgtcgtacccatgcaatttcccttcccttttagttttaggatgaaggcaaagcgtagcagaatgagcatactgcttcttacttggatggcattgactgctttactaaacagaattctaagatctcaaatctggaaatatccccatgtcaccgtgtgggtagcattattcacagaaaaaagcagttgaattgctgaatttagggagtttctgaatagtgtagctggagagtttcatcatgtgtaaattgtgtaatatattatggtattgtaataaaatgaaggcattggtttgtgtccccagccccctcctttcgttttgttacttgtttcatcaaactgttttgtcgtacacttataaattgctattaaactaatggttcattcatttggtgcagtccgaagtaagttttctaggacgtctttctcatcctaatcttgttaagctgttgggatactgtttggaggaatcagagcttcttctggtctatgaattcatgcaaaagggcagtttggaaaaccatctatttggaagtgagtgcttaatgccactgtcttggcaagtgtattataagttcaaacatgaattgaaatagcaaattaaatgtatattttcaactaaaagctacattattttaattgtagggggttctgctgttcaaccacttccttgggatataaggcttaagatagcaattggagcagctcgtggcctcgcattcttgcatacatccgagaaagtaatttacagagacttcaaggcctccaatatattgcttgatggggtgagttctgcacaaaataagcatacacaatatatatttgctgttgccatgctatgagcatgatgaaacaaattaatgttttacttattttctatcttcaacatcagaaatcgttttagtttagtgtgtactattgggtggtcaacttaattaatttctgttatgctacagtcctataacgcaaagatatcagattttggcttggcaaaactgggtccttcagctagtcaaacccatgtgacaacaagggtgatgggcacgtacggctatgcagctcctgaatatgtggccacaggtaatgtcacgctgttctaattgtggtgcatgtgcatatttggtaaaactgatttttttcttgtgttttcaaaactctgtcagtaatttttgaattataagctgttagatacaaaataacccaattgaaacgtgaatttaaagcaagtgatgttattttgtccagctgttttgtcatgttcaagtttttttgtgggggtgctggaaatttaaattgattattagtgtaccttgaaattttgtgtagggcatctttatgtaaagagtgatgtatacgggtttggagttgttttggtggaaatactaacaggcctacgagcacttgataccaatcgtccaagtgggcaacaaaatctaacagagtgggtgaaaccctacctgcttgacagaagaaaattgaagggcattatggattctcgattggaaggaaaatttccatccaaagctgcattccgtatagctcagctttctttgaaatgtcttgcatctgagcccagacatcggccatcaatgaaggacgttttggagaatttggagcgaattcaagctgccaatgagaaacctgtggagcctaaattccgttctactcatgccggacgtcaaggtcaccaggctgtgcaccatcgttctccacgtcaggacggtagtaattagtttctcttaagaaaactaatccctttggttgcttgtgttatttgtctctccgtttaagagtttgcctgttgttcattatgtatttcttggactcacagatttgtacgggtaagtcatgcattactgtattagtattgtaaagtgtaaattattgtgtgttctgctaaacaaatggagaggtctctagtacaacattatcagggaagtgtttgcattaaattcaacgagtctatctagagacaatgtaattgtttacgtatatatggactggtgaaagagagaagagtccagaaacaatgattaattacaaagcagcttcggttttgtacaactaacttcgtaacatattcaagattatagtgtaacggacattttcttctgtgcgcctgttagtttatatcttatctggcattttcttcttgcactccccattttaaattgtgtggacaaaattgcccttaatcccacaagtctcaaccctaaatctacacaaccgacccctccactgtcgcctccgcctcgatagcacgatttctgacgccgatgccgttcctagtgctaacactatcgcaccactgtgactcacccaacaaccaacacaagaaactagcaccgacgagaaagtccgttgtggcgaccatccccatgaagaagcccttcttcttcaataatgtcgatttgcttctacggcttgaggctatggttgtggtccttcttggagaagctcacagaaaaggtgtggcgcaagtgcggcggagaagcaatggggatgagaacagacgtggagtgaaacgatgtcgttgggttttctcttgggagtttgcgaggtagtgatgaaggagaggctgggggtggtgcagcgcagatgaaaggtctattagggtaaaaaggaacaaggatattgccctatttcagaataactattcttaaatataaaaaatacattcaaaaatagatatttcaaaataagttttggagtacttattcatattttggaatgtagtttttttattatttaagattaaaattattctttatgtaagataattttatttgagttgcacacaattattattaaattaaaataattttatgtctattaattttcacacttaatgataataatatatcatatatgataagtctcttaatttattataactatcttaaaaattatactaataataatttttaattagttgatggtgtaaaatttctatagtataaatacatataaattaaattctatcattagagtattgttagagatttttaagagtttaaattttatatattttcagagtaaaaatttgtgcaatcaattaattagaaattattatttcactattaacatagttataataaaataattatattttttggtaaataaataattattttataaagtgatttgtaattaaatgataatataaaaataataaacaatgtatttactcatttttttagttagatgaacgattacataggaattttaagaaaattaaatcaggcttagtaggatttattcaataaaataatagagattaattactcaataaaagtttaacaaatgtatcaaaatatttatcatatatttcaattaagtgggtcccaaaaaaatatgagaaatatatatatatatatatatattataaaataaactttcaatctaaggtataaactttaattgggagtatttatatttaatgcttcataagatcatgtcatgtcatgaaaataagaaatcaagaataatattaatgtacaaatttggacatagaaagatgaataagactaagagaagagaaaaaaataaagagaaatatgtgaatgtgataggaatgagaatgagaaataagaaagaaaaaaagaggaaaaataagttataacatagtaagtaagatgtaattatctcaaaattaattgttttaagagaaaatactaaacaattagcttagtcgttaaaaatggaaatggaaaaatatccgtgggaaaatgttaaattcaggaattaatgtgactgaatttagaaattcaggaaccaatgacgtaagagaaaaatatccgtgggaaatgaaaaaaagtaaaaaaaggttgaataactggccttgtaggttccgtctaaagaggaagacgcaagcatagagttgagttgagttgagttgaggaatgaagtagcgtagcagtgtcatcattcatcatctgatcggcgttgctatggatatcatcttctccgttgcttttctattacaggcaagaactgattcctctcctttctctttctctttctcttaattccctgttgatcggttggttgacttggactatcacactcatttccactgtccatgttgatgtaggtattcctactctcttcttcgcctgctacctcacaacatgaaacctataggtacgtacggctaaatctacattcagattctttttttccgaaccactaataatttctctttagggctaagcattctgaagaatactgcgcaatgtatgatatatgcggtcaaagcagtgataacaaggctctcaattgcccatatggttccccttctgtcaaggtaattcattcatctcttttttactaaactaattaatgccgcaccatcttcatttaactataatcttctaactccagccatcagacctactgtctgccaaaattcaaagtttgtgccccaccataactggaaatgtttgttgcactgcggatcagtttgacacactaagagtccaggttcaacaggcaagttttttaactcggtgattttggttgttgtctgttgcattagctcgctcttaaccatttctagcttatgataaattgctttatctttttcttggccgggggtatcccaaaaacttatctaatatgcaggactagtatagaggagatgagggagaatatatacagtttatgttggactggctattttatgaattttcttttactactctcattaatcacctcattgacatgatgacatattgacctagacccttatcagtattttgtttatttctgtttttattatgcagtaacagaaactttgtatcttgcaggctgtaccaattctagtgggctgtccagcatgcttgaggaattttctgaatcttttttgtgaactttcttgctctcctaatcagagtttattcatcaacgtgacttctatttctgaggtcaggcatttccttctctgaacttgttttttagtaacacttttttttttttttttttttttttttttttactttttaagtttttgggtggctcatttatggttacaggagtgttttctgtgcttctaggtttatatatatatatatatatctttttaaagtaactgtacaactttggcatttgttttcttttagctgcatgttaccctatttgttagtttttatggtttggagatgctgtttttggagttccaggaagtctataatactgaacgatttggggagtaaaatttccagttattcaccagaccagtgttccctttaccccttgtttggttaccatggaaaagagaagaaaggaagagaattgtgtggaaatgtagggtgcatgtgtgtttggttgtctggaaatttttgaatttcagtatgggttccatgccttttatttcttacctaccaaacaacttcaattcaaatatttcctctctattccattgcattccattccctccctttctttcctctcaaccaaacacaccattaatgcaattattttatgtatctgtagcttcattgcaaattatgtagtggttgcttccgagtttataataaagagaaataaagtgaaaataatatatagtctctagagccgataaaaaaaaaaaatctgtaggtaggcttgtatcctcattgcaagcttattcttttcttatgacagtaggttcctctccactggtggatgtttaaaatgaaaaaatacaacaataaagtagctaaataatggtatctattgatgaaatcataaatgaaaactttagttattaggttaaatgctaattgctaattcaggtgtgaaatatgatgattttagtgaacttgcaatattgtttagcttggtattggcaaactgcatatgtttagctatagtttcttaatcatgcctcattgctcctataactaaccaatctttcctcattaaaagagtttagaagaatgtaatgatttgatgctttttgtgtttttatttgttaatgttacatgtttatgataaaaacctttggagaaccacaccacaaaagctaactgttgaagttggagagcccaaagccttataaacccccccctagaatcccatacttccaatgtgagactcaagtcctatatcttgcaattggatcctaacattctaccatgctccgcaacctcaatgcccatgcgggatgttttgcacccataatcatgttagtgttttatgtagacttattgggaaaaatgaaacttagttcaaatatttataaataactagtatgttgagttgtgcactagcacggttgccttgttccttatatatgtaccaaaatggatgacttgtaactatagtaataattttccattgtgctgctggtgtcattttccttcttttttattaagcccaagtagctttcttgttgatataaggtccagttttttttgttatattttatctttagtaggcaacaattggtttgggcacatataaagaagaccactagaagtaccagtgatgagattagattgcatggtttttagcatgtgaaaagggggagaggggagacttagaagaacattggaggaagttgttaagaggaagggatctcaaaagagtgatgagagagagagcgagagagtttagagagagagagcgagagtgcagagaaagcgagagagcgtttagacagggtaacagtagggggggtagaagaggaaacccagacagccaccattacggtgagcttaggtacggagaacttcctgcagcaacggcgacgaaaagaagcacgacggcaagaccaaacaattggagggaacatacagatatctcatctttctattttacgcgctttcctgaggatctgggggagaaggatttgtggttcatcttcaaaaaatggggggatgtgagggaagttttcatcgcaaaaaacaggaataaaagtggcagacgttatggcttcgtgcggttcaaaggtgttgagaatattttgcacctggagagaactctggacaacctcatcatcgggggccttaagctacacgcgaacatccccaaacatgaaagggaggaccgtattagagcaatgaaaggcaagaatgttatgtttgaagaaggcgtaccaggtgcccacgcagggagagatattcatgggccaactcacaatcctcaccttccaaggcaacctgtccagcgggcaacatatgcacaagtggttgccaaacctaaatatgctggtaggaaaaaatggtatccgaagcgccgttacgactttaacaaaccatcctcctcgacgattacgcttgagattcaaatggaaagtaaaaaatggcttaatgaagcatgggttggaaggctgaagaaactgaatatgttcgataggttggaggaggaaataggatgggaaggagaaggggatatcagaccaaggtatattggggaagatatggtacttctgatgggcctaaatgatgctaaagtggaagagatacgccgacacgaagaagtatatggaatggaaagtttccattctctggaaaagtggaatccaaatttgaaacccgccttccgtcttgtatgggtactctgttggggtatacctttacatgcatgggacacgacaactatggccaagctagtgactgcttttggtgaactggtggaagtggatgacgaaactgaggatctccaacgccttgacagagcgcgcttactcatcaagacaccatggaaaccatttattaggcataatattatggctaccataaacggagtcgatttctcgattaacttcgttgaagaatcaaacgcggggacagatacttgccgatgctcaagacggtgtggtgcggacttctccgacgaagttacatccatggacagttctgaggcgggtagtgacttggtcgagttccagtcacatgggtatgtttcaaacaccccgcagcctgcgcctcaaccgcgagaggtcaccccgaccacctcgccgccgacggtggtagcaaccgaggaactcctgggtaacccagacgaggagcggtctgtacactcaaggttgggacagaaccaagcggacagtgctttcggctctgacaactgcaacaacagcaaaaacgctgtcttggtcacatcaactgacaagctgtcacctacccactgtgcacacagtgtggaaaagggaggggagaaggagggatgtcctgaatcagactcgcttttgcggaagccagaagaagttgttgctacaaagaggaaggtcaatacgggaaagctgtcgggagcagcaaatgctggatcagacagccttatgtcagggcaagagagagacccagctatggggaatacatcagataggatggggttggaatcacgtgaggagacaatagtgagagattctctagaggctgaagggggccccactatgggagaaaggatattatcagaagaaaataaaaacaactctttgggccaaaaaagtaatgggcctgaatggcaagtatattccagatgcaggggaggtaaaaacaaggctgttctagttaaaaaccaagctcacgacctggacgctaataataaaaaaaaaaaaaaaaagaagaaagttcatctgtgaaagagatggaagctaccaatggacaacaaagcccacttacacccataaaaagccacaaggagagtggtttaaaagggattactgaatgggggggaggatcaaaagaatttgtcactataggatccagctccagctcgacatctataaattcttcaaaacaagttgacttctgggcactagcccaacaatttggggtcaccagccacaacccggaagagttgattcacaagatgaagtcattggaagaaggaatcaatggtgaggcattgaagtggggtttctctgatggggatttatgaagatcttatcatacaacataagggggctggggaggggggtgaagtggaattcaataagaaaaatggtgagcaaacacaatgtggatctgttatgtctacaggaaaccaagaaggagcttattgataaggtgttatgccaagctttatggggagattcaggtgcaacctgggaatcacaatctgcaatcaacaaagcgggaggtttactttgtatttggaatgaggagtcttttaaagtagaaaaaaggctgaaaggcagcggattcatttatctggaaggactatgggtacctgataacaaaaagatcacaattgtcaatatatattcaccttgtgatactttgctgaaaagatccttttgggatgagattaagctgctgaggatgacaaatatgggcggcttatggtgcatcattggtgatttcaataacattcgaagagattcagaaagagtgggagtggcacagagcaaccaggaaggtagaattgttaaggaattcaatgattggattaaggagcttgaagtggaggaagctcccaggattggaagaaaatttacatggtacagaccgaacggaacagcaaaaagcagattggacagggctttggtatccgctgaatggctaacattatggcaggggtgttcacagactactttggaccgcaattactcagatcattgcccaattatgctcacatgttctcatatcgattggggccccaaaccttttcgttttcttgactgctggttacaggacaaatcccttaaaaaggttgttacagaatcttggaattctttagctggaccaggctggggaggctttatactcaaagagaagttaaaactgcttaaacagaatctgaagctgtggaataaacatcagttcggagatattcaacaaaaaatcagaagtgtagaactggaactgaataagcttgagctagaaacagaagacagacaaatgacagcggaggaaattaaaaggcgaaaacaactacaggaagatttgtggatggcagcaaattctaatgcttcgttattgaggcaaaaggcaagatcgagatggatcaaggaaggggactgcaactcccgtttctaccacctgtctgttaattggaagcgacggaaaaacttgctaaatggtgtgtcagttaatggggtttgggtagatgagcctggtagagttaaggaggaggtaaaaaaattcttcaagcataagtatcaagaacctgacttcaatagacccaaattagatgggattcaatttaaatccctggatcagcagcacaatatttctttgacagctccttttgagctgtctgaaattaaagatgctgtatggagttgcggtagtgacaagagcccgggaccggatggattcaatttcaaattcataaaggaattttgggacacactaaagcccgacgtgttccgcttcatggatgaatttcatgccaatgggatttttccaaagggagcaaatgcctcatttatagctttgatccctaagattttggatcctcaaagtttaaatgaatatcggcctatttctttaataggctgcatttacaagattgttgccaaggtacttgctaacagactcaagagggtgatgcctgccattattgacgaacgacaatctggttttattgaaggccggcagctattgcatagtgttgtaattgctaatgaggttgttgaggaggcaaagaggaataataaaagctgcttaatcttcaaggtagactttgaaaaagcgtatgattcggttagttgggatttcctcatgtatatgatgaaaaggatgggtttttgttctaaatggatgtcatggattaaaggctgtttaatttcaacttccatttctatcctcataaatggaagcccgacttcagaatttcagcctcagagaggtctgagacaaggggatcctcttgcccctttcttattcaacattgcagcggaaggcctcactggaatgttgagagaagcccaagcaaagaacttatatgagggttttaaggtgggaaggaatcatgttgatattagcatccttcaatatgcagatgacaccattctctttggggcagccaccaaacaaaatgtgctagctttaaaagtgttgttgctgagtttcgagatcgtgtcgggcttgaagttaaattgcaacaaatgcagtgttggggctttgggcatgaatgaacattgggtttctgctgctgctagtctcctacagtgtgggatgttgtccgtacctttcaactatctgggcattcctataggagcgaatccgaggagggtttcgacatgggagcctatcattataaagtgtgcgagaaaactgtctctatggaaacaaaaatacctatccttcgggggaagggtaaccttaattaaagctgttcttaactcgatccctatattcttcttttcttttttcagggtgccgaaacaaatttctgcgagcttggaaaggctgcagaggaggtttttgtggggtggcagccaggaacagaagaaaatctcgtgggtgagctgggaatctgcatgtctatctaaggaaaaaggagggctgggaattaagaaattagatagttttaatttggctttgctgggaagatggagatgggacctattccatcaatcgggggctttgtgggtaaacatcttggagtcaaaatatggaggttggaggagtcttgacctcacaaggagaacgtcaacagaatctctgtggtggagagacctcagatcgtcattctcatctttggaggcagatggatggttctccaaaggtgttaggtggaaggttggttgtggagataaagtactgttctgggaagacagatggatggaggacaatttatctctaaaagaaaaatatcccaggatatatcagatctctctacaacaaggtcagcctatacagcttatggggtcacccaatcagggaggttgggagtggcactttctatggagaagatctttcatggaaggtgaattaaatacggcgataaaatttctggaggaaatacaaccactgtcagctgctggacagcaactagattcatgggtatgggcgagagatcctagcggaatttactcagtgaagagtgcctacagcttgcttaatttggaggaggccaatcaagacagagatgaagttttcaacatcctgtggaaattgaaaatcccttgcaagatatcgtgctttgtttggagactcatgaaggatagattacctacaaaacaaaatctcagaagaagaaacattgacattgctgataccacatgccctttctgtcgcagctttccagaagatgcttcacacctcttctttagctgccctaaaattctacctttgtggtgggaatctagggtatgggcaaacatcgtaggagtgtattcggatacaccaaaagaacatttcagacagctttctttctgccacctacgtgggaacaatcttaataggtggctctcttggtggtctgcactgacttggcgaatttggttccataggaaccggatcctttttcataacgaactctttaatggttatcaacttatggaagatgctatatttttttggtggtcctggcttaggaacctagagccaggttttgacataccttttcatcaatggtctagtaacttgagggaatgttttgtatcttaggggtaaacttagtcgttttctgttttatccttgttatcgggcagacctacgatggcttctgttttaagccttcttagttctgctttgattccttttgtatacttgtatagcagtacatcttgtactgttttgtttcttaatataatatattatatttttgctgataaaaaaaaaaaaaaaaagaggaagggatctcatggtgaataatatccatgaagatatggtcttttatcaagctgaatagtcttgtgtgatccatgtggatgacctcacctaatgggctaagatttttgtgtttatttttatcagtaactaaattggtgaatatagggggaaaaatcaaaacaaattgcattattaataggcaacatcacgttggcccacccaaataatttttgtgaaagaggacaacttacctagcgctacctcccgaagcaaacaaagcaaatgaatgaggtggtttggaaagaaaatcagtgattccaaatcaagcagtagtaatttccgttagaaacccaacaagaactcaatcgttgaatcaactgtacaaaaatatatcaatggttagaataagagatgaaaaataggcaggtaatgttttaaggagcatatgacattatgacgtattatattataggaaatactttgttttagcatgtctctcatgcatcaagccacttttgttctgttttgtttctgctagcttgtacttacagcagtacttcttgtactgtgttgttttcttttcatctatctatatataattatctttgctgataaaaaaaaaatattataggaaatactttgttttattatatagatagaaaaatcagtttttttcatgtgatttagtcttataaattcactctagacttgaaattataatttgatattgaccatattatgttcatttcaggttaatggtaatatgactgtggatggcattgattattacataactgaaacttttggagaaggtctatatgaatcatgtaaggatgtaaagtttgggacaatgaatacaagggccatagattttgttggggctggagctagcaattttaaaggtgattcattataacatgggtggatttattgtatgaaatatatgaactctgttattaagtgatcttaccttttcaattagaacgattcccccttcgtgtattgagtattgatatgttcattgtgcatgttttcctataatttgggatggatcttgagttttgcacaacaataaatgggaaaatggggagttaatttaatgttagcttactccttgtatgtcattttttttttttgatcggcgctccttgtatgtcatgtttgtagttctgaggtagaccgcagatatacatgtttagccataaaaaaatacaaaagatcctcctaagttgctgcagacataccttttcttgttcctattttggtactaagtagctgctaatgtttttcataccattagaatatttctttttctctttatctgcatgtattatacttgctcttcatctgctaatgtgttttgtttttgattgtcattgccagagtggtttgcatttcttggtcagaaagttcctcctggttttcctggttctccgtattctatactttttaagacaaccattcttgactcttctcctatgaaacttatgaatgcatctgtatattcatgtaatgacacttcgctgggctgctcttgtggtgattgtccttcatcacctgtttgctcgggttcagaaccttctccatcaagaaaagatccctgctccattagaattggatctctaaaggttgaaacaatagaggctggttttttctttataattaattttcatttgctttatgactgaataaattctctgttttttctttcttaaaagtaatgccttatgaatcataatctagtggaacaattggttccctactgaaaaactgtctttcagcttttgatacatgtgaaactggttttcgtataatgatacctacaggtcagatgtgtagatttttcaatggccatcttgtacattgtattggttttcgtgttgtttggatgggcattgctgcaaaggacaagaggaaggaggagacttggatccggtgcggaacccttattggatgatatggttggtgaagggagtagttttgctaacctccaaaaggatggaactcatcctgcagaggtatgtttaaaagcttgttttgtattgacccatcgttttggcattcagaaggaagatttcatttcttcttgttattattataattgtggaaaccagctgtcccaaaagctaattgttaggtgaagtcaaatgactgattttataattaaataatctgtgcatatcaattcatgcaagagctctttgggcttgaaacatagataatgttcaggttcgcttgtcttgtgcttaatttcaacttatttatttaaaagaatgggagctgcaagggcgatctctagactacttggtcatatagactttaatactatgtaatgaaccaactatctcatagagatcaaatgttaatcaattaacactaagtataggtcttagaatgtgggttgggcctaactctaccccaaaagctagctcatggggtgagggttgccccccacttatatattctatctttgccttatctctagccattgtgggacttgggtttttcccaataataaggaacctttatttattctcttaaataaatgatattccaaatcaccaaatacataagaccctttccgttagcatttatattatgtgtagtttattttttataataaatagtcatcttttcatacattgtgaagcagctttgcagattgaagtcttttgtattctctgtttgaagaaagtttttaatccctcctcaaggttttggatgtgcaaagcagaataaattgcttaggaaatgtgttcttttgcctggtgtatgctgcttttagttggagtgaaataccttaattttacttgatgttttctttcttcatttttttttctcctgttacatgctccttttctttttataacattttttcaggtttcacctcaccagtcttttgaaggagtttctttgtattattatgcaaagggactgctaacacttctatgctattttttttttatcaatcactccccttgctatagggtgatatctgattctccatctctgtacaacttttctctcatacaacttttctctcataatgaactcttttgagcccctccccccaaaaaacaaaagaaaacattgttttccaaaatccattcctgcttaaacttgaagataatttgaggagagtctgtttttgataactggaattgtatgcatagtagtggttgttgaaccatattttgtattacagtatttttactgcacaggactgctacccttgaatacactgtctaaatttcttagaatctaacataagtaaagtagggactagggagctattttctattgaataagaaattcatttaagatcttggagttctaggaaacactggttatacatggtatgtaaaatgatttggataatgcatctgtaatacaactttgttgtgttttcttctggtttagctgtgggacctgaattaactcctggaatcttgtttctcaatttgcctctttcaattctatattaagatgtgttagagttaaatgatttatttcacatgtataatgagcagttttatttattactcattatgatattgttggctttgtattgtcaaataaaaggtgcaacggatagatcctcaagggcagaatgtggtgcaattttcttttgttcaaggatgcctgtccagcttttacaggtcggtggctctagcagttcttgctaggtttacaattacataatctttgattttgtttatgcattcaggacatatggaaggtgggccgctagaaaacccacaattgttctttgttcctcattgacaattgttgttttgctttgtttgggtctgcttcgttttgaggtggagacccggcctgagaaggtaccatattttcatctatattatctccacagtgtacaatttggatttgcttctgtaacttctacatccattttttttatctccttcctggctatcaaataatatctaccttatcctttttatgctgttactttgttttttttaatctacccttagacatgtttggatgagctgttggaacatatgctcaaatgttaagcacattttgcataatagctcaagcaaattaaaattgttttacactgtgaacctatacttataaataatgtcaagaaaaatattttcataaaggcttatggtaccaaataagtgcttctaaacaaaaaaaaaaaatactgtccaagggttcattcttatagcaacaacctttttgtcttcttgagctttctggatagatacataccagtcaatttatgggccttaattcctgaattttagagaattctcaatattctaaatatatataatcatgatttttctgtggaatggtttttgtgtttgttttcttgttcttttacttgctggaggacatttattctctaaatgggtatcttgctctcgctgcctctttaataatatttcttctttaatcctccctctccaacacacaacaaaatgttttctagtacttcaactgcaataagttttaaaaggaacatatatatgctcgtaatccttattttcttcttgaagttgaagaatatcggccttgctgtcttctttgtgttgcagttatgggttggtcccgggagtaaggcagctgaagagaaagagttttttgatagccaccttgctccattctacagaattgaacaggtttcagtttgcttgtaatttattgtacttttctttctggtctcgtaattccatgtgtgtcatctacttactgaaatctaggctccctcttatgtaaatgagttatctagcatgcctgctcatttgcatgtttggcctttaccacctctcttccccacccccaccccccccccccccccccccaaacaaaataaataaataaaggaagaaatatattaagatggagagaacaaaattagagtttgaaaaataaggaatcctcaatgaaatgaagctacctaatccctgaacatatctacaagggagatctcccctcccttaaaaagaccatgtgatttatgccaaatagaagccaaatttctgactttttgatccaatgaaacctccttaaagatacgagagatacttgaatgtattttccacacagaaaaatgatctatttacattcaagagtattacaatgacgattaatgccaaagactatttacaagggagcaattaagataccactacttcctaagatacactgaggctgaggtcagaagccttggctgctacagctgacattttgtggattcagactcttcttggtgagcttgcagtccctcacctcactcctatggtgctgtgtgataattcaagtgctctgataaaataaaataaaaagtgctctgataccatcttgataaactgatattattgatatcaaaggagaaattacaattggtcaaagagtctctgtttacactgagatatgtataggcacagagatcctaactaactagtgacagttgctgacaatgtactaaccaactgacagctgtacacagctgtattgactaactaagtatgaatgagataaatatctcagcaaatctcaatagatatgttttgtttatttatcaaataagacattttgattttattattatgttgatattgatgctgatgcaattccaatttccaagaaagttttccgtttctatcgaaaacatgtactttgcggagaatatgaagtcaaccatagtttcctttttaatgtttttgttaagttgccttcttatttcctgctattattttatctgaaataaatcacattttaaaatattgtttgtgtatatttcagctcataatagcgacaatccctgaatctaagcatggcaaaccgccaagtatcataacagaagaaaatattgaattgcttttcgaaatacaggaaaaggtgttttgattttcagtttttttacttactagaatttaaatggagctgttgtatgcttagtggggccttctttattaaaaaatatgtttacatttcaatattccaacaggttgatggaattcgtgcaaattattctggtttgttagtatctctgagtgacatttgcttgaagcctttaggctacgaatgtgccactcaaagcattttgcaggtccaacccactaatttccaaattattcctgtagtacttttgaattgtgtattgcgaataattaattatttggcttctattatctgtaagttgtacaaccagttggcttttcttattcagttctatatcaatttactattctttttttttggcatacttagaagccgtcatttgatttccttttttgtctttattttattctaatagtattttcaaatggaccctgacaattatgacaactacggaggtgttgaacatgctgagtattgttttcaggtaaacttctgtgatctgattatggattaccttagttttgttattcaaacgagtttaatttaaaacagttttactttatgagcagacaaatattgtaaaacaaaaagattaatgtgttaagaaacactaaattccaataagcatactaattcaagttgaaatatttgcataggtatggaaggaatacctgcttttcatttcttttttctttataaatagtgtagctgtagtgtgtcaaatgcattgaatgtagaaagctccgttggtgcttctatacataattacttcttatagattatggtgaatttatctcatagcttgtgtttaataagacttaaatcttattattttattttatcattttcagcattacacttctactgaaacatgctttagtgcatttaaggctccccttgagccaactactgccttgggagggttttctggaaacaattattctgaggtaagaatcttgaattttagcatagatttctttttatgtgttactgctatgctgattcacctattctaggcttctgcatttgttatcacgtaccctgtcaataatgcaattacaaaagttggagatgagaatgggaaggcaatagcttgggaaaaagcattcatccagttagctaaggtatgactactaaatatatttattgcagttattaattcttgtgtagcttatatgcacaaaatcttcattttcattttatttttgacatctctccataaatccttatgttgctgttgttttcttgattattgaaagaaaattggttgtcatctttggtggtatattaaacttagtaattaactgaagaaaccaaggggacattttgttgaggagcattttggcaacttattgtctgataaggatcaaataaccactagattggttattcagtttgacataaacaacccaacgtaagtgtaacaattttgattggttaactattccctacaaacaaggcaccaaactagtgtgactctcccaagaaacaaccttaggatgacctagatgttggagttttgtgtaccaggtctaatctaagcagaagaaatgtggaagtcacggacatgatgtgccctttttgtagaaattacgcggaagatgcctctcatttattcttcagctgtgataaaattatgccgttgtggtgggaatcaagatcttgggtaaacctaattggggctttttctgttgtcccaaaggagcacttccaccaacactctttctgtcaatttaagtcacagaggtggcagatttggtgggttgctttgatttggtgtatctggtatcataggaacaggattatctaccataatgaagtgtttaatggtctaaagctgatggaagactccatttttttttgctagtcgtggctcaaaaatttagagcctggttttgccattcctttttatcattggtctagcaatttgagggactgttttgatgctcaggggagggtcatatctgtataattctaaatttctgttttttggggaggttttgttcctagcagttggtcagaacgctggtgtcttagccaatgctttaagccacctttgttctgagttgcttctgtttaggttgtaatcacattagtactacttgtactgctattatatattttcaataatattattatctttgctgataaaaaaaaaatctaatctgatcaatcaaaagctgaaagatgcctgagagtaagtaattttttttaagaaatagaaataactaaatatattttctgaagaaaagtccctcatcctatgatgaatatctctcgtcccagaaaaaagacctcatttgcctcttcattctttccagagagtaatgccattctctctttttcttacaaaaaatattaacttcattatctcttcctttcatctgtactatcccatcaccacactgctatttcttcttcttcttttggggtcttttcttccctgggtaaaaagcaccttgctttttagggagttagtctttgatagtgttagaagagcaaagggcaagagatactctcacactaatacaactaactcctacttaagttagagcacagatgttattcatacccagcttgttaaatatatttagaaaagccttagtattggcagatatgaaatactggacgagttgtattttgaaatgctacctgattgtttcactctaagaaatttgggcaagatgataaaccaagtgagattttccatttttcacgactataatttaccaaaaaatgaggtaaaaatacctgaccaaactatcttccctgaatgattgcaatgccaagttttttccatgttcttgtaggttgcttctgaagttgaactgttaaagtaaattgtcaatactttcctttgattccactcctgttgcacctcagaaaattctattcttatccatttgcaaacttttaaatgtcctcatcaaacttcccataattcctttctacatactgtaactcacatgcaacagataatctgaacaagcagcacataaaatttcttaccattttatttttcaagagacatatattaatttgggcctcaaactaagcacattagtctgttattggacatgagcacattctctttctaaagcccaagaaaatcactttcccattgacccatttatacatttaaagcacataaagtgtgtttgagtgatttgtttgcaaaattaattttgaatgaaattgattatgtaaaatttattttgaagtgaagtaatttatatatgaatgtttttactttaaaagcaagttagcagtaagcctcatgtataatttttttttttgtatcccatattagtttcctgatcacatggtccataaccctaccatagaatggaagccttatacaactgtaagaatctaagagaatttcagaaaactaaagtgaggtgaaattgttgattgtattcaacccaacagaaagatgattacacctcaatttatatagacagttaaacaactgtaactgttaacttattagactaagaaagttgcagatgaaaaactgtgtgttctcctgtggagaattctgcattaaatagtgctcatacaatttgatttctacatctgtgcattaaatagccaatctgcaataaatgctatcctacagctgggataactaattaaggaggtaattacagcagtataatgatgtaagatttgctgttttgaatggccaacaaatttgtgccaataataacagatattctgcaatttgtgccaattaataactaatattcttctaatcaattccattggcataactaacctgagttagttagtgattgctgtcaaacagctgtcctaacagataactaactaactatagactaactactaactgtagtttagcctttacagatcagtttaagcaaaaagaaaagtggaccgagtaagtatactccaatacttataatgttagatgttagattttgattgttagatgactctaggaaagaaaaacctgaggtctcggtgttagttaccctagcatgttctagtgaagtatgtttctgaatacagatttgtttatttgttactgatatgcatgcctctaaatctggctgtagcctgtaggcaatatattggtataaagtaaatgttgacccatccactgtcaacttttgaaataaggaaaagtgcacgagtgctttcagatacctacttataagtaggtttgagttaaattgattatattgtcctagtacaagtgtctatataatatgcttatttttttgagtgtgtgtacttttgcacgttgcatgatattacagatatgctagctgaatgctagaggtactttatactatctgtcttttcttctcattccttatccatacatattttgaaccaattttacatttggaaggacgaattgctgccaatggtgcaatctagcaatcttaccttgtcattttcaagtgaaagttcaattgaggaagaactaaagagagaaagcactgcagatgtcataacaatacttgtaagaaatttctgtttctttcaactgaatgtgaaaacatgatttgtgttgtgtgtaagctaatggactgattagtttggttgtggcttcataacgatgtgctttattggaatatacaataaatgtcttctccaacatattattaggtgagctatattgtaatgtttgcttatatatcggtgaccttgggagatagaccacctcatccatcttctttcttcctctcgtccaaggtacgttattttccttgaagctttcaattgtccttttcccatgatcccatctagtataccctgtgacactaaattgtttgtgtatattcaaaagtaaaaacttacatgcataatataagtgccaatacgtgctaaattgtacttcttaatgttaatgttcttaactaatgctcatggggattccaagcatctaaactacacagtagagttgaagtgtagaccattaattatgagatgagagaaaaaagaatgagaatagagaaacacattttattttctgaattttacttagcagagtgatctatttataataattgtgattaaaaagataataaataactgctattatcaagagaactacttcctaagataattcaactaagctaaatgcaataactaaactacatggaagaataattatcatttaatgctcctatttccaacattaataataataaatgcaaaggatcacagagttgacgaggaaacaatttgcatgttttgacatttgttatcattgtggtggggtgttagagatgtaatataaagagatgtaatataaaacagccacatgtcttcacctaataacttaagattttgggataattggttcatgacatggtatctgagcatctatgattgagtgatgtagaggttccttgctgccctacttcttctaataaaaagttaaatttcagctaaaggtaggtgagcctctgcatgtgtacactttaatccctaaaggttcttgcataagtaggcatgttagagatgtaatataaaattttcacgttttcatctaataaatttagcttttgcaatagttggtttatgacatggggagtttattttggaatttggatttactagttgatcattgtaaatattctcgtttgctatcatgttgtttgttcaagtatggagacttaggttcatcttaggttgccatttgtttttgacagagtccatagtattttctttaaattttgtgtttatgtagaatattatagagtattagaattagttgtggaatattctagagtattataattagttgtggaatattctagagtattagaataagtggtggaatattctagagtattagaactagttgtatataatgaaccctttgggtttcaatttgaatgaatgaaaaagagtattcacatttcaaaatggtatcaagagcaggttttcctgttatcattgtgcaactctgaagcctattttttttttttttaaaaaaaaggcctaccctcttttggtttgaggtgacttatggactcttctaataatacgagtgaggagtttcgtgcctctcctaattttgatggtgttttcatctccaaggctgggtatgagcaatttcagaaggtgatgcctcaatttgctgaagcaactagttgtgttgctcaacaaggtgttgctcaacaaggtacgacattccatgttaatggtagtaatcgttggattctcgattcagaggcttctaatcatatgacaggtaatgcaaccttgttttgttcttataccccttactattaactgccacgaataagaacagccgatgacagcttctctactattgctggatagggattcattaaactttctgaacacattactttgaactcagtccttcatgttccctctcttacttgtaacctcatctctatcagcaaacttacatctgattaaattgtgttgcgatgttctcggtccatgcttgtgtttttctggaacaggattcgggattgaaaattgacagtgctagagaggaagaagggctttactattttgaaaaggatcctaatgaaacaaatttttttgctcaccactcattatctttgtctgatgattgtaatgatgttttgttgtggcatcgtcggttaggacacccaaatttcttttatcttcagaagttgctcccaaacttatttatcaataaaaaatccagttctttttcttgttatatttgtcagtttgcaaagcatcctcgtgtttcttatcctcctagagttcgtcatgattcttctccatttaccttgattcatagtgatatatagggcccagcccatgagaaaaatatctctggtgctcattggtttattacttttattgatgatcattctagggtatgttgggtatatcttttaaaggataagtctgatgctgcatccacctttaaaaacttccatgctattcaaactcaattccagacctatatcaaaattcttcgaactgacaatggtactgaatattttaattctgttcttggatactatctcaaccaacatggtattctccatcaaagttcttgtcctaacacccctcaacaaaatgggatggttgaaagaaaaaatagacatcttcttgaagttgctcgagctcttttgtttaccatgcatatccctaaatatctatggggggaagctgtcttgcatgcatcatatctcatcaatcggatgccttctcgtgtcccaaattttcattcccctttatcttgtcttaccgacacctttcctttttttggggctcattctttccttcctctcaagttgtttggctgtgtggcttttgtacatgttcctcccattcaaaggtccaagctcgatcctaagtctattcgatgtgctcttcgaaaaggtaccagatcctgtactgctcaccctatttcttatcatatctcgtatgaaaagttatccccaggttttcgtgctttcaacactattttagacaatacaaaaataccaaaaaacatccaagaagcacttgatgacccaaaatggaggaatgcagtttttgaagaaatggatgcactaaaaaaaaatggaacttgggaatctgtagcattacccagaggaaagaaaatagtaggttgcaagtgggtgttcacaataaaatttaatgcagataatagcatcaacaagtataaggcgagattggttgctaagggattcactcagactcatgggatagactattaagagacatttgccccagttgccaaacttaatactattcgagttctactatcatttgctgccaaccttgattggcccttgcaacaattaaatgtaaagaatgtctttttgaatggagatttacatgatgaagtttatatggatccaccatctggttttgaaaaaggagacggttcagtatgcaagttgaagaagtctctctatgggtttaaacaatcccctagagagtggtttgagaagtttacccaagctgtgaagggaagaggattcctccaagctcagactgatcacactctattttataaacactatgatggtggcaaaattactattctcattatttatgttgatgacataattgtcacagaaaatgattgtgaggagataagctctttgaagcagtttagctgactagtttgaactgaaagatcttggagttctcaaatatttccttggcatggaggttgctcgtagtaaggcagaaatttctttaactcagaagaaatatattctagacctgttgcaagaaacaggaatgcttgggtgcaagccatcagagactccaattgatcctaatattaaattgggaattgaagatgggaaagaagttgacatagagcagtaccagaggttggtggggaagttgatctacttatctcacacttggccagatattgcatttgcggttagcatggttagtcaattcatgcattcttctaagtaaaaacaccttagtgcagtttatagaatcctcaagtacttcaaaaacacccctggtcgaggaatgttctttcaaagaggacacaagaggttgattgaaatctatacatatgcaaattgggctggctcggcaatggacagaagatccacttcagggtattgtacctatgtctggggaaatcttgtgaccaggagaagtaagaaacaaacagttgttgccagaagcagtgcacaagcagaattttgggctctagcccatgatatttgtgaaggaatctggttaaaaatacttcttgaggaattgaagatctcttattccctacctgtcagattgtattgtgataataaggctgctgtcagtattgctcaaaatccaattcaccatgatagaactaaacatgtggaggttgatcgtcattttatcaaagaaaaattggaggatggtagtgtatgattgtcatatatacctaccaaagagcagacaacggatattcttaccaaaggattacacaagcccacctttgaggatttgattagcaagttgggtatgattaatatatatctcccaacttgaaggggagtgtagaatattctagagtattaaaaatagttgtggaatattctagagtattagaattagttgtggaatattctagagtattagaataagtggtggaatattctagagtattagaactagttgtatataatgaaccctttgggtttcaatctgaatgaatgaaaaagagtattcacatttcaatagtttctcatggatcttacatcttacttctctcaaactatatcctctctatgatctctctgatttctctcaagatcttaagttcatttgttggtgtcagagctgttttggtttggttccattatgtgagccctcaagggagcttcattatttgtgagagcagttcacttttcaatttgaagattcggtaacaatttactttagtgcctaaagctttaagtttcaaaggggttttctgtttcctgtgtcattagtggtgtaagatgggagacaaaggctgatagtaatattggactattagagtagaagagtagaattcccttttctactctaatatggaccaggtttaagttgttgaccattttttaccataattaatgagaagacctataatgtacattctatcttgaattcttgtgtaggttttcatgcttatcacaactgcattattttttttttttccaattcttttctcatgtggttgatgcagatatgatagaaattaattttaactttttcaaatgttatgggtagcctcttcaactctggctatttactctaatacttctcattcttcaacttgatgttatccaggtattgcttggtcttttgggggttttgctagttatgctttctgtccttggatcagttggatttttcagtgctattggagtaaaatcgacactaatcataatggaagtcataccttttctggttttagctgtaagtctttgtttttatcattaccaagataattttatgaactgccatcagagataccatatttatcttatataagtattatgcaagttgaatggactaagtgcctgtttggttgtattatagacagaagaagaaaatacaaagccactgaaatctcttacaagaacagtatttatactgctgagattcagttatgactgtcaactgactaaggctaacagttaactaactacagtagaaaaactaaggttagttattattatttacacttacaccccccgcaaactcaatggagctgagaaaccaaaggtagctcatctacattgagtttggagctcaaatatgtgaacctagtagaagacaaaggcttggtaagttaatctgcccattggtctgggcctggtatatgctgaaccaccagctgcttagtaagaaccttttttcggacaaaaatcacatccaactccatatgtttaattctagcatggagaactggattatgagctagctgcactgcactggaattgtcacacagcatgataggtgtagaataagggactgcaagttcctggagaagagtctgaatccagagaatatcagctgtggcagcagctaaacttctatattctgcttcagtactggacctagaaaccaccttttgctttcttgatcaccaagacaccaggttaggaccaacaaagacagctgcaccagatgtagatcttctgtcatctgggtctgaagcccagtcaaagtcacaatagcctctaagagaaagatggttattaagagaggcaggatacagaataactccagaatgaagggcacctttaaggtacctcaaaatccttttcacagcagtccagtgagactcaagagaagccataaactgacatactttgttaacagaaaaactgagttcaggacgagtgattttgtaacattttgcaaggctccaacaactgatctgtaaaaggagggatcttgcagtaaatcagagccatgttggagagcctgcagctagagttcataggagaagaaatgggctttgcttctagcatattggttttctgtaacagatctcgaatgtacttggactgagtcatcaaaagtgctccactggataatgaatgaacctcaatccccaaaaaatagtctaaagagcccagctgcttgagagaaaatgaagcattgagttgctgaattaacttttgcatgagtgtaaatgaatttccagtgataataatatcatctacatatactaaaatgtaggtagtggtagaggaagtcttgtaaatgaataaagaagggtcacatttactgtcagtgaacccaaacttcaacaaagtcatagcaacaaaccactttgtatctcagagcttgtttaactgacttggcttcagtatgaacaagaagtaaggaaggatgaattcttggctgcactatgtcagctttggctgttgtaaccataggatgcacattgtctggtctgacatgagcaggttgtggagtattgggagattcagttggagacaactgaagagggtcatcagacagcactgtatcagtatgaacagaggcagaagaagccaaatgggagactgtgcaggatcataaggtcaggagacaacattatcagacctggaagcctcaacagaaggtgaagagtggggagcctcaggagaggatgaggaagaaggattagaattgagcggaggatgagaaactgactcaatgacaggtaaggtggttaaatgaactcagtaggtgtagaactggaagtaggagaggaaaagagagaaggataaggaaactgattttcattgaaaataacatctttggaaatgaaaattcactcaatcactggctaaacactaaacaaaggttgatgagatgtctgtcctacaatataatgccacacaatatttgatttcataaccaccaaataatttcttttgttgagtgtttgcaatgaaagtgggcctcaacgattttgttgatcgtttgaaagctcatttggtggctaaaggctatttccagacttatttccttggttacattgacactttctctttggtggcaaaaaattgcttatgttcttttatttctaaccgtggatgtcatttttgttggcctccttaacaacttgacatcaagaatagctttcttaatggagatttataggaggaagtacacatggaactacccattggttttattgctcagcaggagtttggcctaagtttacatgctttgcaaatttgtatatggtcaaaagcaatgtccttgcacttggtctggatgttttagtattgtattacaagcctttggcatgactagaagtgaagccaattattccatttcctaacaatgccaatctcttggtcaatacatttaacttgtctatatagaggacattatcatcaccaataaatattaggatgatattgaatgctcgaagcagaatttgttcaagccttttcagtttaaggatgttggcaagcttttctctgggtatagaagttgcacaatgtggatttcctagaggaaatatgccttggatattctagaggaggctggcatgaccaagtgtaagcatgtcaatagacccatggctcccagcataaagcttttaccaagatagaggaagccattaccagatcctaaataatattgaagaatgattgggtaactgaactttctcccaataactagttcaaatatttcttttgatgtacatgtgactcgtactaggatgccactgttcaggtcttagatacataaaagagctataggaagatggttactctatgactatgatgatgctgatccggcagattctcctttaggcattcttcctcaagatactgctttcattttggatgtaatctgatatcttgggaaagaagaagctgacatcaagcaatggcagttgcaatgcgtgaactcgtatggctaaaatagtttcttaaggagttaggtgtttgtaaagagcaattcatgaagcttgtgtgtgataatctagcttccctgcataaagcttcaaatccaaggtttcatgaaagaataaaacacatttaggttgattttcattttgtgagggagaagagccatcctggagctgttaacattttcaccaaaattctttgaagtccttgagttaattatgtatgaaacaagcttgttgcatgactcttatgcaacaactttagagcaagtaatataatgttcttagaatttgagtttgggcctaactcaacactaccaatctggcttgtaaggtgagggatgtccaccacttatatactttaatttggtcgtttcactagtcgatgtaggatctccaacacacaccgctcatgccaaggactagacatcttgagcgtgaagtttgcaagactggacatctgcggatgttctgataagtgataacagactaatagcaattggcatgataggcccaacaacaatcgctaagataacaaatgttattataattattagaatgttggaaagtaaacattaagaattgttatatttggttcatgtcctttgagcaatagtgccataggaaatagcttaaattcatttttttttgtcttgtaaatactctcttgatgtatataagtatcatacatgctgactgctaaagataattcagaacctttcttctaaatttgggccattctctacattcaagttttattaatttttataactctcctgccctgcttacttttctgcaagtgtggttagatttcactttttgtttttttggattttcatttttttgatcaggttggtgttgataacatgtgtataatcgtagatgctgtgaaacggcaaccctcaggtttacctgtagaggaacaaataagcaatgcaatgggtgaagttggaccttcaataacactggccagcttatcagagattctagcatttgctgtaggatcatttgtttctatgccagcatgtcgtgttttctccatgattgcaggttacagatttttctcctctcaccctgtactttggacaaaaagaaaactgaatcgacatcatctatacacataaaaaggagggtgaaatatacaactcctttaaaaagtggttttaagatttcttaactcctgaattttcttttttatagctttggcggttctactggacttccttctacagattactgcttttgtagctttggttacattagactttatgagggccaaggataataggattgattgctttccatgcgtgaagttgaatccgccctctgcggagcaaaatgaaggtacatctgagttatggcatgtatacattggttttctgctaagcctgcatcttacagtttaggcttttgggtattagggtttcaaattggtatagcctttatgaccatgttgtcaataagttgatcatttatgctcctattcttatgcatctatgatgggcccttttgctttgtctacgcttcaagcccaaagctcgtttgcatgaggggtttacttggacttataaatcattcttgttactctatctaataagccttaagcttttaggatcgggttggtctttgacatgatatcaaaggctccatgtagtggttataaatttgatccttgttgtccttttttggcttgttgagatttaatttcagcactacgtatgaatgttatgtgatttgtcaatgcttcaacttgaaaggactctcacataatgaaacatcaaacatgttaaggatataaatcactcttaagtctccaccttgtagattaaacacattcacacagtttatatctaacatttccattgaagcataatcatgaattattttcagcttctgtaggtactttgtattttaaactttttctctctccttgcttatatatggttctaatcatatcctaatcaaagtgtaggtgttaggcgggaaagagatggattactgacacgatatatgaaggtaaagttatatttagttcatgagttgattatgtgtaaactaaaaaatgatttttattgtattacccatgttttatgaattcaattttgttgttttctaattttatttggcggtcataggcaaaaaattctcaacataacgccatataacttttacattgttagagtggattagctagataaataggggggaatttggatggaatgggcattcagttagttagaacatttgtaagaaaaagagaaatcatttgtgaaagagaaatcctaaattatttacatatttacaacatagataatatatagtgttagaacttaaatgtaataattttatattcaaaatagataaaacaacttaatcattagtctcgtgaaacaaaattataagttatatgagtatatgaaacctctattttggaagatggaattgaagaaatgaaacaaccaattagagtgcatgcattgaatgagtgagtgacaaatagagtagtggaataatccataagataagctatccttcaattccttttcatttatcaatttaagcttatatgctcttcgatttctttcatgagaattggtgaaagaaaaggaaggataaataatgaacattgactcgtgtgattattgcaccaattcgttaatggataataagattcatattcatttgagattcatcttatgatacaaattgctagctagctgaatcacatgattcaaatcgtgaattgtaatattccaataattatgatagctgccctatcaggactagttagttagttagttagaggggattaatcatataaataagggagaataagattcgaaggggcattcaaagaatttgaagatttgtaagaaaggaattatcctttgtgaaagggaagcagcccttggacaagaattacttttccttgttctgttcagtttcaatccagaaaaattcactctttatttccatcttgtgttcctatcaggctatcacttttctgatcaaaattaactctactatcatcgtgtgaatttaggaggttcatgcaccatttcttggactatggggagttaaaatcttggtcattgccgtatttgctgcatttaccttagcaagcattgtaagtttcttgggaaacgagaaaatattaattttcagtaagacccttttcggaaatgtcattctatttgtgctttaattgtttccttttattttgacaggcattatgcacaaggattgaacctggtcttgagcaacagattgctcttccacgggattcctaccttcaggtttaagtttctatttgttttcccatgttccattttgtactagccagcctcttacattcattttttctttcagggttatttcagtaacatatctgagtaccttagagttggaccacccttatattttgttgtaaaggattacaactacaggttgattaattttattgttcttagcgtacttatctctattaattgatgggtcttttaagaagacaattcaatgttgtgttatttacaaacttaaatgatgcattaggcatgcaagctgctgttgaataaaaaaggaaatagaattagtggaaagaaaattttgtatatcattattttcctccactgtgcttgcacgtgaaaaatctcttatagatgtatcaattaagtgtattatctgaacttttgaacttatttcctgtgagtctcttgtgcagtttggaatccaaacacacaaaccagctatgctccattagccactgtgattcaaattctcttttaaatgaggtaattcaatggtcaagttcttcaacaagtgattattagtgtcaacctccattcattagttctagtaaaaactgaatattttattgattgcttgagagaaaactcagtgaaggaagtgtgtaaatgatagtaaatactggaaacaaagaactctaagactaagagattgactgagattacatcaataatatctaaccaatcttaggaaaaaaatatcaaatacagaaataaaataaatataatccccccaagccgtgtcatatatatgtaattctaggacctcttgaagacttggtaaaatgtcagccagatgatctttggagctcatagaggtattgataatgccaaaaagtatcttctctctataaagtggcaaacaacttatgttgtcttctcgtgaaaaaactagatttaatgagatatagggcagattatcacaaacaagctcctaagaccaaactcttaaaacttgcaagtcttgaagcaagtgttttagccatagaagttcacatgtggggtgagtcatggtgcaatactctacaatctagccacaacattctgcttcttactcttccatgagatgattcctctcataagaacacaatagcctgaaattgaatggaacatttgtcactgacatcttttgcccacttggcatccaagtatagtataatatttgtgacccctagccatataaactaggccctttccttgtcaccccttaatgtaccttagtccaaacaactgcattccaatgacattagttcaagaactggctaataaggctccccctgattaggaagaagcttcatattttggtcgtttgggtatcaaatggtttacaatctagcattcctgttttcttcatgtgtgatcgctgtacccaaattgcaagtgttttgctttattttcctaaaaaattaaggaaactcctcatgaaagtcatatctacaaaaggaaatatctctaaactaaaactaatctaatttttatgggttttccaaaaaaaaatattcttttgtggtttatttttgttcaatttttcctttgaaatcatgcacataaattcataaaaaatgaatttatcatggtgcaaactagctgtgctcacactgaaggtagttttgctcatgaagatggtaagacccttccttgcaacactggtaaatctttgggcctaagagactatagagaagttgtttttcatcagacatgttaaaaaaaacaaaaagggaaaacatattttcaatcacagccaaaaaaaatgagaagatggtgctttctaacagctgcaaaagaggcagtattaggacaaatcaaatcctgaaacataacagggagtggccggtgtcctgttctgtggtggcggtggcaagtggtgtacacacacctgaaatgcatggctactggttgcgtgagtaagggaacatggcagatctgatgagagctaaaactttgggtccccatcagcgacgtccgctttgctggagaaacctgctggaaaaaaaaaaattccagcaatggcagtggtggataatggtagcattttctgggctgtgggcacaatgaaggtgccaaggtgaaaatgaaagctacctaagatagctgcaatgaaggctgcctaagatagctgcaagaaggaagctagtcttttgatgcatcaagagtctgatacctacttgataaacctaaaagatttgaaaaagaaagtggctataagagtatagagtatacttactcttacagtggctgaagtttatttcttattcagcttattacaaaggatgattaccactcctatatatagactacgttacttttaattcaagaatttcaagggactaaaaaaatgtccaacactcaagagtctaagaatcttttttttttatcaccataacattgatgcagagtatccaccagttttactaatgattaatctccgccggagaacctaactgaccacctttagtagggtctcccctcccaaccacatttttttcatccacaaggctcaaacccgagaccttgcttaaggggaccgagcccaggaccactcggacatacgacttgttggtagagtctaagaaactgtacaggctaacttatgaaagaaataaaccctattaattacaataattatattcttcatttatattgttgaatggctgacttgtacataactacacttgtaatgtaatttcatttttatcttggcatatatgaatggattctgtatatattgttctgtaacattgcagatatctagagcatcattagtgccaacatcaagctacatagccaaaccagctgcctcatggcttgatgattttcttgtatggatatcacctgaagcttttagttgctgtcgaaaattcacaaatgattcttattgtccacctgatgatcaggtatgtgcttctttaaatgtccttggataatatttgcatgctgcatgctcaactttccttctctcctatatgttttgaacttatattcatgcacattgtatatgtatatatggtttctcttttctcctgccttgtttttgtatctacatcaattgtataaattataaatctaattaaatattgctcaatgtaccatcgtatatttttcgtttacaatagtaaatgtctgtccttgttcagccgccttgctgtttaccagatgaagggccatgtgggttgggtggagtgtgtaaagactgtacaacagtaatatacttctccctctaaacttttttgtttattacataggacactactttcctaatagatgtgactgtaaatcaaaagggtgaattagtaaagcgactgacacttttggttgattcctagtgtttccgccactcggatttggttaatgatcgtccatctacagcacagttcagagagaagcttccctggtttcttgatgcactgccatcagctgattgtgcaaagggtggtcatggagcttacaccaacagtgtagatctgaatggtttgaaaaatactcactccctctttataaaaagacaaaacttatatttatatttgctgtaacattctcaaaattgaaaatctaatatgtagattttgcttataactggatttcaggttatgagggtggtgtcatccaagcttctgagttccgtacttatcacacaccagttaatagacaagtatgcagtgtgataataagtgatgatcttattttctttgctttggcatatttttttcatacatttctctgtttgttctaatgaaaatcttgttagggtgactatgttaatgcaatacgagctgcaagggacttctcggcaagaatttcttcatctttaaaggtttggacgtcaatggcattatgcatttttactgagttgttttggcattctggatcaaaaaatgttcggaatatagtctacacatattttttctccttgtaattattattttttatttgaactgcatttatgagccttttcctaggattgactctactattactgctattattgttattgtgttatttctgtctttcaccaatctaatattttatttgggagtccttgttttcacttgacctttgagtctcaatctctgttggtattagctcatcactttttatctgactgtctctttgttggtattaagtttataacaaaatattagatgatatgattatggatctacttaccattttctcatccttatgaagcattttgtaatgactaaaatcatacaatgtctcatattgttgattcttttgtggatcaccacttcttgttgattaagtttctcttgtgcagatggatatttttccgtactcagtgttttatatcttctttgaacaatacctggatatatggaagttagccctgatcaacattagcatagcactaggttggtattccaaaacagtttaaataacacatgcacacagtatgagatactcgtttgtcaaccttgttgtataagctggactgtctgttatgatccttcagtttcccttcctgtttgcagtttatatgttgaaatttaagcctttattgagaagatttatacttgtgttcttggcttcaaacttttaaattctatctctatggtctttgatggagtactctgttgtcttatcaacatcaaaccactttatgttttccacttgaaagatatataggatcttctgttgctttttatgtatgaaagatttcagtatcgggatttagactacatattcatgggttgtacttatttgcctccctcttgatatttctgattggaccaaaattggaaagtgaaaatctaattcgtgtcttctcacttttttccatgttttgttttccatttctcggacataaattcttcaactactacttgtgtgaaaatgtatcatatcaagtctgtgtctttctttagtcaaattcgtttgtcattaaataacttatggtgatataacaggtgctatttttgttgtctgtcttatcatcacatccaggtatactgagccttgtatatttacagtcaacttgaaaatttgttctctccagttcaagattaagcataatattctttttctgtttgctattaaatgcagcgtgtggagttcaataatcttattacttgttctgatcatgataattttggatctcatggtaacatttatcttacagttgcaaattcgtttcatctttcatttgctttccctttcaatatcctatttattacctcttagttacagaataaaacaaatgaactttgtgactcctgcagggtgtaatggcaattttgggtattcaactcaatgcggtgtctgttgtaaaccttattatgtcaataggaattgctgtggagttctgtgtgcatatagtacatgctttcatggttagtctgattctctgctctatgaattgacgggtcttcccatatggtacggtggtctttttgaggaaacagtgatatttgtcaatgtgtcactttataattcctataacatgtgaaattcaatctgctttgtcaccagggaaatattgacacactgatttattcagggagaccttttatgcaattgaaccacctgccttttggtgactatgctgtatgcacattttctgatgatcttgtatacatgtgttcacaggtaagcttgggggataggagccaacgagcaaagacagcattgtgtaccatgggggcttccgtattcaggttgactgtatgtatagtggcatttggaaagatcatggattgtaatatttgtagccttaccccacccctccccaccccactatgtgcattatttttggccatatcactggtcagtgggatctttaacaccccctgttacgcagaggactggacatcttgaacatgaagttcaaaggactggacatctatgggtggtccaataacagcccgataaatccaacaacaatcgctaggataggttctcataccattttaaaatttaggtttacactataggctctgttaccatgttagaattgggtttgatgggtggataatatggtaggtgacccaataatggaataaggatagactcttgtaccatcttagaattttgagtttgggcctaattctatctcaaaaccaggttgtaaggtgagggttagtgttaggctacagttctaatgtaaggaaataaatggagtaaataggataataagtctctgcttattctcattcactgaatggtatttaaagataaatacatgcagaggatctgctgtggccaatcagggcccctttgcaatagaaaataacagaattagatgctgaatttgtggatgaggcagtgagaatattcagttgctttgtctttatctgggctggtattacttgtagtcactgaggtgtgttgacctcttgatggtcctcgttggtctgctggtgttctctgtaatagcagcgttgctatcagttagtggattaccccctaattatatacactattttgaccatatcactagagtgacaaaacttgaggacttccggttgacaatgcatacccatatgatgttctaggtgaggaccttgtttgtgttcctgggtggtatatactataaacccagttggaggccacttactcggtggtatgatagttattattttggaaacaagtttataggttgacagggccactaaggtggatgttgccagtgttttgttattgagggaggcactagtttctaagtttttggattagatcacgtaattttcgtatgtatctaaatatgtatttttacatgtatcgtatcctatatgttttaaaataattgaaccacagtaaccaccgtattggatgcgtatcaaatttgtgcatcaacttgtaacataagcataagcttgagggagaatattaaaagatatgaaggttgttagtggtgggcctaggctagggtttgggcttgtactggtagttctaaaactcggtctttttaatggtataaataggtgcatttgtatttgtgtgtgacatcttagtatcaatctcaaaatacattgtttgccatcatttgttctttccccttttcctcgtcttaaccctaaaggttcagcaaagatgaaatgttatgcgcatgattaaaagttcatcttatagtagttatttagtagtgtagctttgatataactcttgatctgttgtcagagaattgatgcaggtataccatttataactaattacaaaaatgatttgaatcgtggttgaattattagtgtctgcctgcactattattttgttgacactttctttttgtattatttatctttgtttggtagtggaatcacacttacaaaattagttggagtcctcgtcctttgcttctcaacatcagaaatttttgtggtatgtgacatatcacccttggctccaaacttgattgtctgctcaagaaatgttaaagtaccttttgggtctttgcaggtgtattacttccagatgtatctggccttggttctcattggcttcttacacggtcttgtgtttctacctgtaagtttgtggtgtttggtgttgctctataaagtataaataactagcttttcattaacgtcaggaaataggttttgcttcgattccattttgcgagttttaattgttggtcacacttggcattcaatttcacaatgtgttcaacaagccttacacgtttgacattgtcattaatccatacaatccccactgggattagttctgccggtaggaatgaaagcactttacctatacggcttatgttcaattcctactgccagcaatcctctttggtggacaatctgttaatatttagcaccactgtaagcccttgctgaggcttgtggtatgttttgaccttatataggacagcctacctttcccctatatgtaacatccctgattttcgatttttcggcgactcacattacggtacttcactcaacatccttgttaatcagaaccctccgtaggtagccatttccaagacctcgaaaatgagttctgtttatttctaagatcaatgactgatcccacaaaccaatacaagatttttcagtgtattttgtcctcattcacatgctttttgggaaatttcccagaaaatcactcatctcattactactccaagtgaagcacgcttaactatgaaattcttaagtgatgggttaccgaaaaatagatgcatcttgttggtatagatagtaccaattaatttttttaagtcatcttcaattgtacagtcacatacctatacagttttcggatctctctttctagtgtgattcgtcgggattctacactatacctttttattcccaaaaaatatacgtgcacaataactaattagaaaacatctcacatttcctgcccttttttttcaggtggttttgagcttgtttggtcctccgttaagatatacagtcattaaggagcagctagaagacatgccttctgcttcatcagaacagcctctaattagatgaaagttagattttaactacgtgatcacatacttaatgaacaagaaaatttgttttgattatagaggattaatattatcttttcgtttgacttttagatcgagaaagttcattgcttatgtatctgaacatggtcacggagaaactctgctgattttttgtaatttctgatgtttggtaggtttgatcatcagttacgttggtgtgtatataattccgagaacatttgctgatatttgaagcaaatatacgtttataaatattcatatacttttgtttctttttaattattattaattggctactgttatcattcttaaacaatgaggataccaccaagaaaatcaacttatataggattgttttactttaatcatgataaaaattacgtgaccaaatttgttatggcgctgttaaattgtctttagtattgatatcactacacgttgaacgaaaaaggaactatatgtggttgctttgaggagaacggtctcattttgatgagatctacattcaactcaagtgtagttcaaattgctaaacaaatatgtatgtcgttccatgaaggccgaacatttgtttgagtggccaaacggtaaaacaaacatacccatgtgttctaacaatcatcaactaacaattcactttccattcagatttctaataaatggctctaacaaagtagtcagtgaagctatttgcaatgtatgacgtgtttcattttttcacctatttttttagtatgcggtataaaatcaaaatatttgaacattcaaataatataaatacatcttattgacatccttcatttatatctatttttctcttttttgtcatactatgttattattattattattatatattcattaaaataacttaactgaaaaataaaactaaatgtttaatataataaattaaatcatatttattggtattttttcaaaaaatatttatagcaaattaattttgtccatctaaaaatttgaaaatttgattttagtccctaaacaaattttatccctcaaaatacaaaatattgttttaagaaaatgtataatttttatcaaatgtttagcacattgatatgattgtcacgggcaaaagaacctaaataatacaaattaaataaaaaattacgcatttggggcggttttgaaactatttacaaatctggggcagtcggaaccgcccagaattgggcagcactggaaccgcccaaatccaggtggtaccaagggggtagaaccgcctggatttgggcggttccagtgctgcccaattctgggcgggaccaattcgtgacacgtgtcagtcctgcacagatggagcgatgcatatataaacttcggacggtcataacttttgactggaatgtccgattgaggcgaaaccggtggtcacgcgttcgaaattgagaggagaaggcgctggcaagtttccgaaggggacttggtcaaaaattttctcaaaaaaggcttctaagtgcctcaaaattgggttttaatcttcgaacatcccaaaattttcttgttttctaatttttaattatttattcagttaattgcatgctattttttatttttttcattacttctatcaatttcaagcatttcgacatatcgtacacctcgatcggacatttctattaaattttttttaattttatatgattttatttaatatattttggattttttgtatatataatttttaatatattattttatttaatataatttctaaatttttatatgatcttgtttgatattttttggattttgtatatataactaatttttaataaaatattttattcaaaaaaaaacttttcaattttatttttgaattcgaaaaaattgaatatttttttatacttctcattttttatatcgagactaaccccattaaacacattattctcatcactctcatcatctctttcatcctctcataatttgataattgtctttcaaaaaaaatagaagacaatttcccttttctctttttgttccagtcaaaagcacgcagtcgattaacccgtcatagaaactacactgaaactcagactttctgtcaatcggtgactcaattgtataaaattagtgtggccaaaacatatacatccaagcgagaaagagaattagaaaggatcgtccatctttcatggtgaatgatcaattgtgtgagtaagttggtcatcatctttatctctctgggtaagcgcaatgcaattctttgcatttcaatttgattcactttgtctcacgcagagccactcctatttctagagttctgcaatgtttccccgctccaagtgcgctttggaattaatggggtgctacaatcccgattattgtgtggtgagtgcactttgggacgaataaataaaaattatattaaatatcaaacaagatcatataaaaatttagaaattatattaaataaaatgatatattaaaaattatatatacaaaaaatccagaatatattaaataaaatcatataaaattaaaaaaatttaatagaaatgtccgatcgaggtgtacgatatgtcgaaatgctcgaaattgatagaagtaatgaaaaaaataaaaaatagcatgcaattaactgaataaataattaaaaaattagaaaacaagaaaattttgggatgttcgaagattaaatcgcaattttgaggcacttagaagccttttttgaggaaatttttttgaccaagtcccctttgggaacttgccagcaccttctcctctcaatttcgaacgcgtggccaccggtttcgcctcaatcggacattccagtcaaaagttatgaccgtccgaagtttatatacgcatcgctccatctgtgcaggactgacacgtgtcacgaattggtcccgcccagaattgggcagcactggaaccgccaaaatccaggcggttctacccccttggtaccgcctgaatttgggcggttccagtgctgcccaattctggacggttctgactgccccagatttgtaaatagtttcaaaaccgccccaaatgcgtaattttttatttaatttgtattatttagattcttttgccgattgtcacgtgtcaaataactttttcatttttatttttaaaaaaatatttttatttttataaaactttgaagtttagttttagcctctataaaatttaaagtttcattttaatcttcataaaattcaaatttttgattttaatcctcataaaatattatattttatttttttaacataacatattaagtaatattaatcaaaaatagcatagtattcataatttaataatattattggtagggtgaaaatgaggactcacaacgtacatactcatctttgttactagcctacctaaaattgtgttaggatcatttatgcgtgaacccaaatctaacatgatgaagaccaaataagatatgtgggataagaataggtcaacttgatttactaacgtaatatattaatattaaatgtataattaaatcgtggattaaaagaactataaagtttaagtaaaatatatttgaaattataaattctttattattgattaaaatttaatctttaacatactttttattattgattaaaatttgttgaaaaatatgaaattatactttaagtgggtctcataaaatcttgtaattttcaataaaatcaaccaataataaagaaggatgtatttaatagagtgcgataagaaaatatattgctagcatctcttaatcaaatatgtcataacgttgaagtttaacgacacactagcaatgattctatggcaatcatgtaaaaattaaattgaattcccttccaaaattttcagtttattgaatcattattctttaagaaatcgagccgcaaacagtttcaagagccgacttaagtcccttccaaccccacatcatttcctttgtattaggagagagaaacaatctaatgcagcgggattactttatttatatgaatataaatttgggttatatatagatatatagttggatggagcaactaatatggagctttgtgaataaagtgtagataaggtaatgttagaatttgaagaacaaattaagtagaagtaatagatataaataaaatgagtctaacaagtaaaagcaaagcagaaattaatgcaaatgtgatggtacagtactaaaaagaaacgcctagggtggaagaaggggtagcggtggtgtggggaaaagtaaatgtatttggtagaatattaagaggagaagcttgaaagagggcgagtctaattgtgcggctctgagatgttgtatgcaagtctttacactcctcaagatcaccatcgcaggctaaaacaacccactccccgtcatcatccaaatactttagaaccacgttgctgccgttgctcacatcgtttaggttgaagcgccttgcgatttccagctgcaattctgtgaacccccaatgtgcttgcaagctaaaacggattttttcatccgcaaaagtagccttcactctcaagggttgttgagggctttgtgctgctactgctgctgctgctgctgctgtaggagaagatgagttgttgttggacttggatgattgagaactcaactccggaaaactgttgtagaatgagccgatctgtatggcaccctcggcaccctgcacggaatcgatcacaagttgaagtttcttcaaagagtggcccaccttcttgattttccttgaaggccacctcgttatgccatgctgtctgcatatccttttcagagttgtgggacacactgcatgcatgcattcattcattcattaaacaagagctagagtagagagagacaaagaattaatgcaattattaatggatcatatctctcaccgccaatgctctttgccgcatcttttaggcttcctgcaaagtactgtcttagaacggccaagctcatagtcttctcggccttggttcgtctcttctcgcctggttttctgccacgcttcccactaaatgtgtgtgtgtgagtgtgagattcttccccaaacacgacctggtcatgtgcctcataagtactggtggcagtactgtcccagttgcagtagtgagttgtggtgactttgaactcctctttgggttcttcttccaaggacacgcacacacctttgtgttgggcctgggcctgggcctccaccatgtgtgcaacccaggaggcctgagatggggattcagtgggcaagaatgcagaaacatgatgatgatcctggatgagagcaagatggaaggtagcgaggcaagcttggtgaaggagaatggataaagagttgaggaagtggttgtggtcaggggagtctcggggaaggaagaactccaagacgaaatgaaaagaggcagtggaagtagttagaggaatagcgacggcggcatgcaagtcaaagagggtggcgtggtgagagagaggatattcggcgttggagaaggcggttatgtcggtggcgaaacagggcttggctgttgcgaaggcagtcccaacaattccttgtccgcggaaaaggtgatgctgagagcaggcctcctggaagcccaagaggtgggggtgcccttcccccacaaagcacgctctctccacagtcgacacgtagttctcatcccttgaatggccgcaggacttggcttgttgctgttggacgcatggagcccatgccagagccaaaggcaccttctgcgccttgcacacacacctcaccacctccatcatctctccaactacctcatcctccatttcaatctggaggacacccaggcatctcccactccctctttccaatacaggaacccccacacatccctcataagggtactcgttgcttctaaagaaccgaagcttcaccttcatgttcctttcaaaagcaatcgaagccgactcatcaggcccaggcccaggcccaggcccatgttcatggcctgtgctcctccgcagtggaacccatatctgaatgttgttgtttgtgtattctctcaagtattccagcgcagcctctagtctgtctttgacggaggaagatggccctggattagcctttggtccaatccaccatgtcttccccatgggcatggcctcgctgctcccactcgtttctacccagcaaccttgtcccagcaactcctcaatcaactcttcttcacactccgaccagctcccaaacgcgccatactccatctccatgcttcctcgatcctatcctatcattttacatttcataaaacacttaattatataagtttaatcacccagaaagaggaggagccatcaagtgctaactcaccttaaacttaagattgcttgatgagaaaatatgattacctcaactcagctcagctccactcgacatgcgaccgatcgacaagcctcttatataatgaccagaaaaggaatggaaactctttctttcttctatttcagtaggacccaccgttaagcaaaaaccagagagtgccccctcagtctcacatctctcaccgtgtccggtatttatttatatatacatatttttcccttgcttatcactgctgtaaattatacaattatatccttcatgtatactatatactatatgctctgcttcctgtattacaaacaacacccagcaaattaaaataaaataagatcaagtcattctcatgatgaaagcaacatatagagatgaattcaagttactgggtatgtttctttgagattatttttttaaaataaaaaagtattttttttacttaaaaagtaataaaattaaatataattttacaagttttcaaggaaaaaattagtttattattttttataagttaaagatatttttcatagaaaaatatattatgtaatatattcttatattataaatttaagccttcacttgaataaaggttttttaagattcatcatgttcgctaaatcacataacttctcctgtattaatttttttttattcctttcaaaatttattacttaaattcatttttaaatttcacataaaatcgaaataaagtttttttaaaaaaaattggacacgtattaaattaatagatatagaaattgtgttttatttgaataattgttttcataattttctttttaatatattttttatctcattaattatgtatttctatctaattggactattccaccaagttgattaatcatatcaagcgtctatgtcttttaaactcaaaacttaaggaattatagtgtctatagttagatacacacagactgggatacaaggtaagggttgaatccttgcatatggctgaatccttaaagagttaaagatgacccagatcaagacaaacaatcattatgccatgaatgcaaagaacttaggaccaattttgctatcctaaaacctttttatcacgtgagtaaggggtcatacacacctatacacttacgtaggagtaatgtgatacccatcactccttgtatatatgtaagtagaaaacgatgacaaaatcataagaaaacacatgatataaataggtgtgatatattctcattatcacactcaagttaagtagaatagatttcattaaggtttcttgattctttttaattggaaaaattttcaaagtgtgttttctaacatgaacactaatataaaataagatatttgttatagtaatgaaaatatattattatagtttattgtaattttctgtctaaatcaatcatagatattttttattagactcaattacattcgagtcaaataggatcacatactataaacaataaaatcatttatttaactatttaacacaattatatatctaatactggaattcatcaagatctcttattaagttgaaataacttcatatcaattaattagtgtgtttggtggtcgcagtttattgtatttaagatacataattttatcacatattgaatataaaataatgacattttttatttaccaatttaaatacttttgttttaaaatttactcaaatataaaatatccgtaaatacatggaaaagtaccttgtttattaactaaagaaaactcaaagcaacgtaccttacttgttataaaaaaaaaaaaaaaaaatgattgacaggagtgttgggggtgctagggatgtctgtctggccattaatgaattgaagtaagctaaagtagcacctctttgtatgtataatatttaatatataattatgcatgaccggctgtataatagtgggagatcattaggatgaagaatctgcactacagtctacagcaccattacttatgaccaaaacaaaaagaatatatagagagaggaccatgcttgtgcgccacatgccaatcctacagcaaaccagagatgcgaaattgcttaaagtggcaccacatcgccgaaacaaatttatgcttcattcaattttacccatacaagtggatcgcaacaatacttaagcttcattcgtcgattcggaattcttagattcttttttaattaaaaaaaaggtcataatatattaattctaacgtccaagttgaggccgcgaaaattgaaaaaagattcttctctgtttcattggtgaattcattgacgtaatatgcatctccaattcctggctggctagctccatcaacatggatgcttgggcccttttttttatataaaaaaacgtaaccttatttctcacactttttaagataaacagaaaatgtaaccttagagagacatttttaatcataaatgatacttaggacatttttcttttttttcctccatcatattaaataatatatttatatttattccttaaatcatttcatagattcaaaataccttaattataaactcgctaggatcaacctatataataatagattaaaacaatatacatgaaataatagattctaactttgtgcgatcattttatatatatatatatatataataaaaaaataaaattgatcagtagcaagcagtgtccattgtaacatgaaagaagaaaaaaaaatctagcatttggaatataatattgagattgtctccacctacgagctgagtactttttgctatagcttgaactgttgacgttgtaaataaattttacatgtataaaaacaataaataaaaatcatatatggagaaggatctataattctgacatgtgtcgtgaaatgggtcaccgtacgaacaagaccagccggacaatagagtttaaattacttttcaaccaacgggatatacaacagggataacttcttagctcgcagtaattcgtaatcgcattctttcaatgttattgcgaaagctacgttttatcgttcaaaaaataataatcagtacgtttttgatagaaaatatgtacagtatttaaatataattcataattaatgttaatttaaatatattttaagtaaatttaattattttaaaattaattatatcagaaataatttttatataaccttaaaaaaaaatcttgtcaaacatattctcgtcatccttacaaattagaactcggttattctttattctgcataaccatatttgcctctgataaggattgaatatcaatttacgattacaaatcaccataaaaaattatagaataaattatacatatttttttgagatttaaacaaattatatatgtttctctttatgtttaattaagaaaattatacatgtcttatttttgtttttaaaatttacccaaatcttcctaaatgtcatttaaatatttgacaataacaagttatatgtattgataattatgacaaaaaaagattcaaatatattttttgtccccataaatataaaaatgttcaaacaattttttttgtttatttttgtcctcacacaacttaaatttgttactttttcgcttagagctaggtttgaatatatacaacctaagtgtatgctatgataaaaagtgttaggtttttaacttttttacatccaaatctacacatatgtcgttgtaaaaagtgttgtatttcaacttttttacattgtgtatacatataagtgatttaaaaaatttgaaaattttaacaccttttacaacaacatacatgtattcgaacctagttccgggggaaaaataacatattcaaattttgtgagtacgaaaaatagataaattgttttgcagtaacgaagtctgaacattttcatattaatgaggacaacaaaaatattttagtcttttttaatcaaaattatcaacgcacatgaattattattgtcaaatatttagacgacatttaagagtttgtgtaggttttataaacagaagaaagacatatgtaatttccttaaatctcatgggaaatatgtgtaagttaaaaaaaacatatataatttccttaaacatgaaaagaaacatgcataatttactcaaaattataataaagaaaaatgaagaatgaaagcaaaccaatttaatattcataatggatatcaattttacttcttctaaatcctaagatacatacatatcatagataaatatgtcaattatgaaattttgtatttcactttttaataattttatatattatgtatttaataaatataattttttaaatcaaaaatacatattaccttgtacaattcgaacaagaatgttgaaatgttttttttccatttttaatatatattgtgttaattttgacatatattaataataagtttaaatatatttttgatccctaatatatgttcaaatttagtgtttgtttcttaaaaaaaaaatatttgcatttgctcctcatacttgaacaattttgatactattagttaaatgatgacatgtccattaaacatttgataagacgatttgtgactactctagaaaccatcataattcatttcaaaatttaaattacaatttctgacaattaaaaattgctaaaatcaatgaaagtaaaaatcaaataatttttttggcaatgactccttcctcggcctaatccatatccctccattcataaaatgggcaactggatcataaaaattacttctgctaccaaatatgctacccatatagattagtatttcactctagcattgttttcatttcaattaatagcgaccaatcaatcatccaaggggaactccataatagacgtaagagaaatacacttagagggaatgtaaaaggttgaacaaccaatttaaatattggatgcaaggtgacaaagcgatgcaatcttcggtggaggatgtcttagatctaggtttcgaggcgaaaaatcatgatcttggcattggactaaacctgagtggtgtcgatggggaggttctacttgatgccgatgattgaacttggacaacggcaacgagatagttttgctcaatgttggagatagtggtaagggagaagccttggcatatgaggttgtttctagagagagatttatttgttgatacaaatctcaagggaacaaaacttgccacactagtaagggaaggtggcctcttttgcatgtgagctttttttattactttaattgattctattggtttttaaaccataccgccaaaagttgtaatttcattctataaataactactgttagttttaaaaacaccacaaattatccttcaaaatagctaatgaacatgtcattacttaacttatggcagagatttaaaataaaatttttcaaatatcagaaagcaaatacgaagaaaaaaattattaaggagcgaatgcaaaattcaagtatatattaaaaattaaaaaacatatttaagccttaataatatatataaaaaattgaataatatttttttatatataacttataccaaagaaaaaatttttttacaaaataaaaggaaatttttagtcctacaatgaattgaaataaatttatccattgaaatattattataaagtataagaatgactaaattaacaatttatcaatcgttgtacttgactcatcactctaactggctagcaaagtttgagtcgaatagtttagaacctttcgcgttttggtcctcttgtaccctagaggcaattagtttgtttagttatgtttttctgtgctttggctttgtatctttttcactgataaaaaaaaaaaaagtacttgactcatcactttttaaatgtcaaccttcaattcatttgttgctaaaagttattttcttttagtggatgtgtgtgtgactaattaatgtgtatttgtgtttattaaatcaatctcaatatttcatcggagttactattgtttacaatatcccgataaattaacataacacaaattttttacaataagagatgtgatacaaatacaaaaattcatataataagttactatacaacatcatttttttctatctttactattttcttatttattaaatttaaaatttaaagtatttctctttatttctgttggttcattgattgtacactttgttgtataattttttatacaattattattttctttaagtaattaaaagtttataataaccagaaaaatcggaggacaaaaattaaacataattatatttacatatagtaattaaaacatattttaacttttttcttaaattttcttttcaccctaatatgtttaaatataattttgatttaatataattagttataatattaataatcaattgttgacgcaatcaattattaaaagaatttatttttaactaagactaagaaagcttagcctactttttgtcgaggtgggtcattgttaatgcgcttacgcatgtacagtaattactaattagtgaacggagcaaagaaatcccttttaacaaataggtcggcccacgaatcttcttctttcaatttctgatgaattaaaaataatataaaaatttgtatgataaagagaaggaaaaatatatttgaaaaatgaattgagaactagtgcaacaggaatacagcacattaagaacacacacaaaaataataataataaaatacagtattaacgcattgaaattaaagtatatgtgcgtagagccaacctagcctacaatcgaataaaattgaactgatattagttctcactaactttgagcaatttagttcttgtactttaaaagaacagtgatttttatcattcgttacaaatactataaaaagagacaaaatctactgctttttgtaaaacttaggatcaagttgaccaagttaaaaattcaaggacaatacagaaattaaaaatatattttacctaaaatttaattatagttacagagtttaaaagattgagccgcttcttcattttggcgagaaacaaaaatagtttgtcataaactggatgtactttactaacacgtgtatcatagataacataatatataagtttagtattattttttgtttaaaaataatctcactttaagacttatctatgcgaataagaagttattaaatattttaattttaaaatataaaattgctctattatattagaaagaaaatgcaaattaaccctttaaaaaaagtctttatattttgaaaatatgcaatatatcttctccattaaatttttccttagaaatgaataggttttgtagattcgcacgtgactcgatttattccaaaattatttataggaaaatataaattactatcttgaaatttgaataatatatgatttaggatttgtttgttttatattaaagaaaatgtacttattgtgatagatttaaaacttagtgagtttgagtaaaagtattgatacactatttagtataattacaaaaatatttgccatttatgtaattaagcaaattttgttggctttttcattatttctataggaagattgattccaatccggattgatatttgtgatcttgtatgaatacattaatccttagttttgggacatactattaaattatattaattatttaaataaatattaaatatttttttactacctcctcatatgcatatttacctttttatcacaaaataatttatgttttagaaatacaatctaatatttttttttcttcaaatatatccttatttcacgttaataaccgtaaatgcgtgatagattaaagtattaaataaagatattttagtctaaaatacaataatattttacattcattaaatatttattaactccatttggatgacaataaaataagtattaaaaaaacatctatcgattataattaaatagaaaagtgtcattcaaccaattttacttttaaaagtgttagtattattatatagtaaacggaaagcataaccttatattagtcgaaattcgtaagagtatttaataatataataatcataatgattgatgtttgatattgatggaggaaagagggtggatattactgtatactgttgatacttgatactccaatatattcttgacacgtaattgaattcccaaagttggtgtctttctgtttacactcacaaatcacaaccaaaaataactaaacaatgaataatttcgtgcgaatcactttcttgaattgcgataaagtttaatgcaaggctgacttatatgctttgtttgcttcagagaataaaaaataataattaaagtaatgtgtttggacgataaataagaattaattttggttcataaaattatgataaacatggtgaaaaagttaaagaaactattaattacttcactattattgtgattttttaataattacgttagaagtgaatttaaaccaaacatgctattagaagtataattcaggaaattacgataagggtaagttcaaacaaaaacaagtatttctgctgttccaaaataagtttggaatatggagaaaaaaattattctaaaataagtattatattatctttttaatgtaatcttaattatttttattaatatttctaataaatactattttaatttttcatttaatatttataataaaattaattttataaaattaatatactatttcatttatcttttaatttttataaaataatctaaaataacacttattttacaagtctaattcctagactactgtaggaaaaaataaaatcaatttataacgaaagttatgattagcacgtcatttcataggctttttttaaaaactttttttgtcgatttaaaaatttatttgatcttattattaatgtttgataaataaattattttaaaagtctacaatttttttttttaacttgcaagtaatacttttttaaaatattaatgtctaacttttagttttcatattaattatttcgttgttcttaaaatatttaataatatttttttattcttttctgtatataaggtaaaacttttgcactcataagataggttttatcttttatctttttacgtaatatatgattttcttatttttatctttttattacgtacatattgataatgatagataatgagttaatttattttattattaatattttgatatttttatattacactattttaatcattatactaattacaatatttgttttattatttttgcatcatacttcctgatattactagatgataaatttattttttattttatttttgaaataattttgatattatactatttattttaatcattatattatttataatatttttctattaaattttaacttcaaaatattttaactattaaactaattaatataacaaaaacatgatgtatattgaaataacgtatacaattttaaatttattttacatttgatagaaaatattttaagatatataattacattagatgaatataaaatatgcaatataaaaaaatacactccattctatctcaattataagaaaaaataaaataaaactattctcatatttattaagaaaattagttaatttttttaaaaaaattaagaaaactagttaaatttattaagttatgtcaatcacaattaaaaataaacctttttttcttctaaactacctttattgaaacttgatatgaaacatttaagactaagatacactgatatttttttttcttatatttgagactagatagagtaataattaaaagtaattgataaataaattacaagagtttaaaattaaaaaattataaggacctcaaaatatatttttaataacaaaagtaaaatttatataaaaatacaatgcaaacatgtgtatttatgtcattttatattcaacacttacttcaataaataattttatcaaatgcttataaattaataagttaccataacaattttcactttcaagcttttaatattaacttttagttagtttttaactttcagtttttagcttttttatttttatttttatttttagctaatcttgcaaaacatagtagacatatctaatttttttttaaaatcataaaaaataaaacctcaataattattataaaaataaattaatttactatatataacaatttataattaaataataatataaaatatttacactatcaaattaaaagatgaaaaaaggaaaattttaaaatttgggaaaacaaaactagtaagattttttaatgagaataattacctaagaccaagttaaaaataaagtgagaactaatctaattgatcaagtcaaacaaaaaaaatcatttttaataagtagtaaattaatttataatttttttctatatttaaataaaaatatttcagtaagaaaattaaaaaatattaatctttttaaatatcaacaaaatatacaacaaaatgttcgttgtcttttctctctattttttttcattcttacacactacagtataacttctcttgaatgtacgcatgatccgtatccaagttttctgattagattattatatttgtatacctaatttttgtttcatatcattttcatttcgctttttttttctttttcattatattccttatccaaactattaatttttctattttgtttaattttctctttaatttttttctttcacccataactttttcctatttttatcagaacataataatcaacattaataatatttttaatctaaactaattgaagtccataataataataataataataatggaccacatggtatacgtttaatgatgatattctttttacgattgacacgtccacttgcatctttcaatgatttgacatgtaacctatcgtttttcttcactgacgttagaacccagtcagatgctgtggattacaactgaaatttagacacccaacccacttgttttcctcttctggtaattttcacattatttaattggataaatactattttaattcatattgctaacaaattatttttttgaaaaatataaaatttaaattttattttcaaatatacaaaaagtacatattaatcctgttattaacataagtctgttaactttaacattcctatatagtatatacatgacacttttcaatgaaaacgtatacatgtttcttgctatatcaatgaacagtcagggagctattttgtcagaactaatgttttccatactactcattggttaatatagaagtaagcttgaattttccgatacatataatgtcaaaatatgcctcataatctcatcaaaaatataattatgaatgaaattaatgcgaatctaatgcttagaatcggtacttgaacttgacacaacataacattttttttaatagagagggcaacacaaccattttataatacacttaaaacattaacactatgtaggatattatatataattattttttatcctttactttttttaaaaaatttttttataaacatgcatcttaaaataaaatgacaaccttttattataacacctcttaaaacgttttccttttcaatatgttacttctctgatgagatatttcttttaacatctactgaccataaaactaaataaattaactttaacatctttctatttctttcccaatcctttcttctattttttttaccaagaaatacatgactatggtctccgtatataatatatgtccatgtggaaaagcaagaaaattaaaataatggcaagtttattgtagatcgactggaaggtgcttacgaggttccttgggatcttctccttgagttgtttttcctcgagttccaaattccctcgtagcgaaatagagagattaggctctagaaactatagatttgacattaacacaattttagtttagtatttaaatacttttgattgcaatggaacatgtctgatcaacaggaaaccaaattaaactaaatttgagcatgccggcaatcagtttcaaggggatctgcttaattaagtaatataagtatgcatggttacgagataggcaatcgtaaggctttagattctcgcattaaatcatagatacagtttcgctatgtatgttatggatttccatatcttatagggatcttatcaacaattatcttttattctctctatcttattgtttgatatatagtctttttcattagctataacagtagaatagtagcctctggccaacccataaactaacatacgccgttgattcaaaccaatttttccaaatcccgttattatttaatattagatgtttgctttaatcgcttcttcagttatcatcttcgacggcattaattaataaagggtgctgctgtatatgaaataatcgagcccagtctatacatgctttggtcaagaaacaattttatgtgagactcatttctatagtctataatttaaataaaaactgatgaagttctactaatttattatatgcataatgcatgatttaatggcaccaccctgaaataaatatattctaccaataagggaagccccacttctattatcttttctttggatttttggaaactttcaataatcttttttataaaaaaagttcaaataatttaagcttggatattactagcttgttcatgcgcaaaaaaaaatgatctcagttgtattagttattaagcaactcatatttcgtcaagtaattaagatcttgaacctgaaatttgaatcaatggcatttttcttttcctctgtttttttaattgagttgaaagtcaaacaatatttattcaatttctctcaaatatctgaatgacactttttaaatgcaaatgtcattgttctttaattttcccatatatatagaaattttaatgggtcccgcgatggatattaatgaatccgtattgcatctgcattagatatctgatcctttgtaattgtattttattagtgagaagaaatcctgctctacgtgattgatttcatttgtattttttcccttctttaattactttttaatcttttttccttaattaattgaaaaatccatcatattatgagggacgtaagatgaagcgggtagaatatttacaacaattaaatacatttgaagcagatctatattatcaaatcaaacgctcaagtttataccttcaaaaccaaggaattccttgggctatagattcgaaacgatctattcatgatatcgtatccttcattgcttcagtgcttcagtttatatatatatatatgataataaataaacggacaaaatgaaataacttcattgcttcagctttttatatgatgtcctcaagtcttttagctaggttgatgaaagtgaccacactgatactgatctagcatggaagcaaggttgaatacttggaaagacacacaacatttaagttagtatgtatatcaacaacatgacaatatatggaatacaatgtttatctagtgatattaaaaatactttatttataattctcggatgcaggtgagttataataataatgccattcgagctcatcagccatctgataatcctaatagagagtgagtccttttaacaaaaatatcatgaaacacctgacgtacgtgaagtatgtgaacaagtgatgaggatactttgcttttgaacatataattataaaatgcactatgtggtgcatgtaggctttgaatagtgtattaggccttaaatttgtctcccgagtcccggccctataagggatttgagtggttagaactatcctgggtttgatcatactgaatttggcctaatagtgtaaacctcaaacaagagtccaccaaacttggcatgctgataaggaaacgtgacaaacttgtcatctaggatctttaagtagcatctgaacctctagtaaagaactcttgttgctttgacaatcgaattagttcaatcatgttaaaatttgaacctttgttaatcatggtgtagtaataaacctttgttcatctgagcatcggtgttataatgatttgagttaccttttcaattgttgggtgacagttaatgctagttgggcatgtaggacactgttattggtgtccaacccttgagttttaattcaggctggcttcactatgacgcatatttaagagttgttttattcgttatatatatatatatatatatatatatatatatatatatatgcaacaactaatgacactgatgaaaatattaataagtcccaatcttgtatttgctttgaaaaagggctatttaatttgcagtttttttgttgcactttaatctttcaaatttcaaattctttcagaatttttaattttcttcggtttccctcttttgttcacagtacttcttccattctcaagagaccaggcttgcctccaagagcgtttctcttcattattcatttgttcaacaaacgttcaagacttcgatcatcttcgtaaagtttcacattttatgatacaaagtctatcttccttgtctggcctatgtgctctccctagttcttttttcttactttatttaatttttctctattaatagtaaactcacggtatgcatatgactagatatccctagaggtgtggtaaattgaatccttggcgagtgagggaaaagtctaggggctagcttcaagtgactttgattaacttcaattttgcagtccttgaccaacatatataatcacgtttgcaaccagtcattcatatatatccttttactattaatactttaatttacatgtatgattatgtccttgtgacacttagtcctttacgaaggttgttgatcagtgagtcacgggggtggaccgtggacgcccactttatcattgtttttgcacctattccaaactcaaacgttctctagtcataagtagagatgggtgactctacattaatgtaactaccaaatgtcaacattgataatgtatgactaacttgacttttaatgatttgtaatgtacttctttaatttacgaaaggtttgtaatgtaattatgatcatgtgtaagtttttgttgcttcatattgcttatgaagacagatagaaagagacatgcatagagtgaaagtgagatgaaagaaagagttgacgtgtgttgaccattttttttttacattggattgattttgcattaaaaaaaatgaaaccaaataaagttattgttttattatttagatatttttataatgaaatgaaaaaaaaatcattccattcccttcaaattaagatggaagaaaaagaagaaataataaatgaaatggagcaaaatgcatttttatcatatttcttttaatttattttaaacaaattaaataatgaaacttaattgttgtttttattttttaattccattatatactcgtatttcacccttaatgtgaatccaaatatagtctgaattgcacttgtgaaaataagatgcagaatgataggaataattcacagttgaatagaatacctttaatacgaaactaagtaatgtgagatttcgccaggcaatagaaaataataggctcgtacgttccatccatccattgatccattcgaaaagtctactgttagtttcccctaaactactacgaatggtcgtttatgctgggcatgcacattttttgatcttttaaaatatactcttagagaagctgtccaacttcatttcatcttccacttgggagataagcataccaacttctcaggtatccattaaatattatatgaaacttgaacataaatgacgatggtacaatacaaactacaaaggttacatccacatatcttgaattgataattattgttaatgttctagttattaggagattcatatttgtaagtactacgaaggagacgcacaaggttttaaaatagtcgcagttggagtttcattattgcaagaaaatggagctgaaatgactgcaattgtaattggcatgtggtcacaatgagtaaaaagagacttaacaaatgcctttaaaatcatggatagagatataaatgtttataaatagaaaatgaagatggtgtgttgtgaaggataaataataggagagaatgaagccgacatgctatttgttaagaaagaaagaattagagtggaaaagtataagtgtccttgcatgctaaaatgtagagagaatgaatagatcgatgcgattattgcataaattggaaaagtaggtagaggtaaggaaatgagagaagttagggataaagggggagagcaaagagagtgtagtctagagtgggaacctcaaatcgagagtgaggacagagagagaattggaagatgatgagtcccagtgacagcgcttgttgcaactcgctttggcgttggagttggagttggagttggcaagctggagcagacaggcagcgacctcgtggtcttcctggctcatttgttgttgtctcctcaccacattgggcggaggattgatccctctccagtgacgctccgggtggcatctcatgtggccgaagagtgccttccaagaccagaacttcttgccgcactccgtgcagggtcgtgcctctgactctgaccataatgatgtcttccccttccaccctcctgcatcctccattaaccgcttccgcttctgcttcttccgggaacaatcagactccctcttcattcctcaattcaatcaaagccttttccaatggaaccgcatttccttatgtacctgcctcacggttactactgcaactcctctggcggtttcttcttttcaactttttttttttttttaattcttttctattccctatttccatagttcatttcaatcatttcttttaactaacttgtcatttcactattttttttaatcttttttcatttcatattatttaattatatatttttttcatctattaaggttacataaatataatattttcaatagaaatctttaaatattaattaaaatttaatatcaaaatatgtatatgtttcattagtaatacattttaattttatttatattagcaatattattatcaaaatgaacattaaattctcattatcatgtgtgtgtatggtttactaatagagacaatgtctagtacaacatgaggtggtttttttatatttaatttataagctttcaatagagatatttcgttggatgtaatgatatttatttttaaagaaaaacaactacaaagatgtgaagcttgagtgttaaaagttaattaaactaataatcatcaaagtttaaaagcgactattatatgatgttttgaaatataaataaatcaaataggttttacaaaaaagattgtattaatttgtttgaattgatttaagtataataaataaatttaaaactttctcataaaatgaattaattacttaatttaattaattgcgatttaagtaatcatagtatacaagactatatacttgagttcaattgaaactattgattatttttatgtattatatttataacatttaatttaaatattataataacttcttaaatgacttagtattataatgttcaaaaagctcataatgctctagaacgagcattattccatcatgattttgaaggtcatcatggattctccacaatcactcctaagttcttggtaagaatgaagggccaaaccttaaagttaacagtccaagattatcctcctctaagaatatacacctaggacaatgcccaacatagacaaggcacaatttttgctcgaatggaataatacctgtttcattctattttaatccaacatattctatcccattatgtttcaattcattttgtttcattctttatcatcaatctaaacatcattatctaataaaagtgtgtgaaagaagacatcactaagaaagcagggaatgtgggctgaggctcgtggtccaactgcttagactgagcccgcacggactacgattctaaaaaccaattttggaccacagaatggctcattaccctgcaggccatgcagacacaggacaaacttttggaccatttaatttgcaggccagcccgtatattcaatcgagaattacacagaatctcccataatgggacgtgtaagtgataatgattatttgctatcggatgtcatgttattcctgattgaaattgtatttgctaaataatctataaagtaataaatggaatagggagcaaaacgaatttagatccctgttcctaaaaaaatgactggggaggtgtttgtattttgaaatgaaatcatataggggtctgacatctcaaatgactgccctgagctctccagtaagcagtgcatgtttgcggtgctgggacaagattggtgccacctgaactgcagtcagtattgatgctaagtcattatatgtgggttccttgtgttcattagctgcatgcagaattgtttgcaagatttgcaagggatctccatggctgacaaccaaaactgcacatctgcaagatgtggaaccgaattatattagctgatagaatatgaataaaaagaacaaaataagaacatctcaatcaaccactggtggaagacctactaggtacctgtttgttttgccgttagaaaatcaatttttgcactttccaataatgtatggttgggattactttcgatacacattccaattacgttttaaaagttcaaaatcaatttactcaacttgaaaacaaaactacgatgcagggcttgcacacattcatgctgaaaaatcaaagaataccaaaagactttacccttgaaattctgattccatagtggccattgcagttgcaagtcgacaagcaacatccttgacactttcccctccttctggcccaagaaatggatctttttcatctatatcccaaatctcttggtactgttgaagattggaaagaagtaatcaatgagttgcaaactacagttggtgtgagaatagtgacaacgatagagtttattagaacctgaacctgactaatgttccaaacatacaagatctctatgacaaaaaaagatgcagagaaagagattttattttattaaaaattaaggtgaattggcaaaacagtaggcagcagaacaaagtgggcattgagcatgacttactttatcatgcgagaggagttcaaaagaaggaccaaaatagcgttctcgaagatcttggatgacctgcttagtgcttagtaaatgagactcgattgagggataaataaagaggcaagttgttggaagggcttaccttacagtggggtccatcaaaagggagattcaagagagttgcaacaacgttagcggtatgggttgttcttgaaaagggggagtagcaaatgcgtacgttagcaagcgggatattattggcctctagttcctgcgcagcgcagtcagggtggcgtggttaattgaaattgaaaattgagttgaggtaccttttggaatgattgtgcagcgagttgggcctgatgaacaccgtcggaggccaattggaattcggggagagtcccattctcctgccaatgcgattcaattcaataactaagaaaataatattattagattggacttgatttaatttaagagaaagcaaaccatggaggaaacgatgatgcctcgctcgttgggaatgctcttgccatgcctcagaacccagtatctgttcttcacaatccacgacatttgatttgatcccttaccctaacctaatcccctccctgtgtggcataagaattcctgttttactttataaaacaaaatgagagatcccttttatttaaaaaatatctagagaggggcatgagtgcaaattgcagagagaacctttggtttttgtttatcattagtcaattcgtctcctttcctttcttttctgagccgaggctgctgtgtgtgtgtgtgtgagagagagagagagatgggggtaagaagtaaattaagaatgtcagcgtcagtggtgcagcaggggatgaaggaaataagaaggagcgtgacgtacatgcctcgaccgggggacggaacgccgcggggggtgacgctgataccgggggacggaattgggcctctggtgactcaggcggtggagcaggtgatggaggcgatgcacgcccccatatacttcgagaagtacgaggtgcacggggacatgaggcgtgttccggaggaggtgctggattcaatacggaagaacaaggtgtgcttgaagggtggtttgaggactccggtgggtgggggtgtgagctccctcaacgttcagctcagaaaggacctcgatctctacgcttccctcgtcaattgcttcaacttgcccggcttgcccacccgccaccacaacgtcgacatcgtcgtcattcgcgagaacaccgagggtgagtactccggtctcgagcacgaggtcgttccaggcgtcgtcgagagcctcaaggttatgtccaagttctgctccgaacgtattgccaaatatgccttcgagtatgcatacttaaacaacaggaagcaagtcaccgccgtccataaagccaacatcatgaaactcgcagatggtctcttccttgaatcttgccgccaagtagcaaccaaataccctggtatcaagtacaacgagattattgtcgataattgctgcatgcaacttgtctccaaaccagagcagttcgatgttatggttagttagtttaattggttactatagattcatcttcccttccctttccaatctaaatctcttctcgtgttattatctcaggtgactcctaatctttatggaaatctagtggctaatacggcagctggaattgccggtggcactggtgtcatgcccggaggtaattgaatacaaatgcaataataatcgttcattctattgaataggaagtaaataaatggttggtgcactgcagggaacgttggggctgatcatgctgtgtttgagcaaggtgcttcggctggaaatgtcggaaaggaaaagatggtggagcagaagaaggcaaatcctgttgctctgcttctctcctccgccatgatgctcaggcatcttcagtttccttcattcgccgaccgccttgagactgctgtcaagcgtgtcatttcggagggcaactccagaactaaagatcttggtggagacagcactacacaccaagttgttgacgctgtcattgccaatctcgactagactacaccttcccatggctatgcacaatctttttcaaatatcctccgccagttttttgtaatcaaagttcattttctattgctatttttcagcagggttgaaggctcaccctataataattcggcttaattttcatgtaattatgtttgctcaaccaaagtcacttgtaacctgtccattgtttgaggtcaatttgctcaaacaaaggatgcttctctatccacataatctgtaatgtaatgttgattgaaacgaacaacactgccttccaccccctccgcttttcacgtaggaacctttttttgttggaaacatgctatcacctcaaagtgcaaggaaggagaaaagtaggaaagaattaataccgtaaaaaaccaaacactgacatgacttagaggtaatttcaattgagtttcaaattcataggctgatatatatatatatatatgatacaaattcttttctgcaggtgatcctctagtccggacaagtatgcttaaaacgaaactagaataaatgtgattagatagtgaaaattatgcaattaaggtcgtgtgtatttatctatataatatttgactaaattaaaccattttcctttacaaagtaacattgactaatttcattgagagaacccagaaagtgcttctaaaatgtcttaaattatctacacatctaaatataatatccaacggagagaatcctcttcaaaatgtcacatccagtgttgcatccatattctccatctaaagactcacgagaccacctgcaaacatgagttacaagatcaagataacaaatctcgtagatatgaatatcccatccagaatgttaagagcaatatcacataataatattaatcaacacagaaaaataaattagaaattattttcctcaatatctgctttaagtgattaagcatgccctagttcaccaataaactaacaagaagcaaaattaactcttcataaatgggcacactgccatgatcatgctgactaatattatctttgctctttctagtgacattgtcaaacaggacactaggctatcagcatcaacatacacattccgacttacaggtaacatcattttcaatcagattaaaagtcaccttgaaacttcagaaaatgagtattaaccaaggatcacagaaggtatacaacaaggccttatcccattagttaggtcagctgcatagatcaaacaaagccaatgtactcaatgagttggagcaaggtctttttgaatggtttcaccaaagatctttctttacctcccttaattgaactatgctcatttgatttacatgatcaaacgaccttagttaagtttctatcatctcttcaggtgctactcctactttatgtccactaatccaccataacattcctcttttcgcaacattagctcttgttagcccatcattgagcggcattagtcttatagttttctggtcacattgtaatcacaaatcatgcctaaagcatttctccatttcatctgaccatcttcaaccctatatgtatacccttcaaactctgcaataaatttctcatcactttgtaagatagatccaataatcttgaaccatgctttccacctccaaaacattactagcttgcttacaccttctactagcatctaatatactccatcaaggaagatttttttctagaaataaccttttactgtttggtgcacaaaatatagcagctgagtagataagcaaaaccaaggacagaaaggtaaaaataataatattattttcacaagtcgagagaaaataaaccccagcaatgatgttaactatactttactcaatcaaaaagcagagacatgataggaattgtaaaatagaaactgacctccgcaatttgtaaatctgtgtgtagaaaccaccaaggaccattctttgagagtaatctgaaaatgtagaagcacaaaggattcaaccacaaaaggggaaaaaaaatttaaaagcacaacctggcaattcaaaaagggaaccacactatctagcatcagcaaatctactgaaaggacagggtgatacactcaattactatatttctttctcttaataagcttggtggagggttagacatggtgttatccctatgttccagatggtcactttttagtcattttcttcatcatatccccctttcttctttcccccttctttgcttttactttttttttcaacctcctcgtatctatcattgggttcatctaccaccgacttcaattagtttgggttaaaggtgttgttaatgttcatgtaatgaacgctttacaatttcactagaagatttgataacccatgtagaagatgtcaactatagacacagattttcaaaaagcactttaacaattgaaacaaggttaaaaccatggcacttatacaccattccataaagaaactataatagtatagtatgatcagtcatgcatacttctatcatataaataccatcagatcaaatgaattgtcagcccaagatgtataggaaaatattctaatcaaagatggataaatagtagagggtgaaggttgaagtagccatctagtcaaatacaatgggtagagtaacctatttttattttaaaacaagatagaaacaacatgaaacatttcttcccaatacacacaaaattaatgtgccattttacctgacagcaccagctgccgcacgaagagccatgaagagaactaagcccagccatacgccctgaaggccaaaaagtggaggtgcaaataccaagaatgcagaggagactgctcccacgaacatctatgaagcaattgtcataaaagttaacctcaagaagcatatgtaccagaagagaaaaatgtgacacatttagaaaagtaaacaacttaccatggagaaagcagcatatcggaaatcagaaacaccataatggagaccatcaaaaatatatgccagtgcattaaatggttgagaagcactgacaaactagcaacaatcacagataacaatgtaattttgatgcagacacagacaaatgcaaacaaatacatacaaatcaatcagcaataccatacataccaatgccagagttctgaccacctgcaagacttcagagtcctgagtaaaaatggtggctaaagatccaaacgatgcacccagaattgcagtcaagcaaatacccattaccagtccaatctggaaaggcatgatcaggttctcaaataatttcatataacttccttatttgacatagtaaaacaactatagcttacataaaatctaagaataactaatgaatgaaaggcatcaaaggctaaaaattcaatccattaaaaaaaaaaaaaagcgcttacccttaatacaaaactagtaacttccttcacaactttgtattcatgtctggatacagaacttgcaataagggcctataaataataatatagcagtataagcaaaaaggcatatacaaacaagaagacagtaacgaagtaaaggccaagcttaaaagaatctatgaatttaaaatgttaaaaagtttcaaagtcaagcaaactgaaaattttcccaagaggttcaaacaatgcacccagaattatgtctggcttttgttggctcgacttgtttcattgcaagacagcatggtatttttactagattgaaagaaatttaggaaattataccacaagggggaaaaattaaaaagataaaatgataaagaaaaatatacaagtttttgtaatggatgattcaatacctgaccagatgcagccaatgcatctgtcagaagggaaacagccaaccacacttgcatacatatctgatgtgcagccatagctactggaccatgtcgagcagctattgatgtccccaatgtcatggttgaaagaacagcaagtgttcttccaagaaggaaaccacctgtaacagcccacagatcataactgaaacatctacaataacctaacagaaagctaaataatatacacagtaaagaaaagagaaatgtgtccatgcaattaaagttaaacatacataaattaataatctctctaaaacaataatttttctggtcccaacttgggccagcttacaaaattagtaatgtgtccattccaaacacacacttgttctcttaatgctaattcctttaaatagaaatattacaaacaacaaggggaaaaaaaatggaggtgagatcttttgcttggaaagtgttttgtaaacagtgtttgagattgcatttagcttttagttgttatcttcccttctccctactttttcaacaaagagaaaatcattttaagaggatggccaaacacactctttcatctcaggttttaacaacacataataagaaagacacaaatcctcaccagatttaatataattgccaaattgcaggtctcccatctttggaggtagtaactcagctcgcttattcagacaccagatcatcaacatggtcccaatatatctgaggtacaaaaattccatcataattagggttgaatcaagtaaagaaataaagaaaaaagtaatgcttttgaaaaggacttactgagagatgactgtggaaatggccgcaccagttacacccagccgaaagtaatacataagtaagggacataagaagacagctgaaaagttaccaatgcctgcattttgaaagaggaattagcacacacatacatacaatataatgaaaatgaaaatgatttttaaatttaatcaatctttgaaagaaagtaaaagagggcaatccctagtgtaatgttaaaattatgccttggtgacagctggtcatgggctcaaatccgaaagcaatctctttccatatgcaatgggaagactgagtacaattaaccttcccccatacctttgggaaatgaggagcactgtggtatgttagtttttttatttttaaaaagaaagtaaaacagcaagaacatttatgatatcaaaatctaaaattatttttcaagattataaatcacaagtagagggcgagtcctggcacagcgataaagttgtgccttggtgacttgttgatcatcgatttgaatctggaaacagcatctttgcatatgcaagggtaagactgcgtacaatatccctcccctttaccttcgcatagcaaggagcctcttggcaatgggatatgtaatttagttataagtcacaagtattccaatcaactaaaaatatcaattccctctcactcttcagcaaacatgctatgataattttgttcattccttagagttgcatgcgagctagttaataataacaataatgtattcatgaattgcgagtaaaggtattagagtacatgcagaaaataaaatagaaaaggtattgaaaaggagaaattaagaaagaaagcaaacacttgccgagacatataacaggagtttttgtatccttaaaaccgcggaaaatgccttgaagagccaaagaaagtacaaccgcaggagcgccaacagctcttaaagagagaaagtgtcgtgcgggaacatatgttggattttgctgttgaaaaaggagaagacaaatgatatactcggaagaggatacaagaaataaaacgcataaaggagagggcgaaaacatactgtaggaacaccaattaaatggagaaaagctccagctcccaggtataaagctaaagcctcaaaaaagccaagggagagtgccaatagcaaagcagtggagacagaggagagttgttgttttgttttggcatctgcagtggaggaagccttggcaatgtcctcggcaacaaaggaagtagcaacacttagaagggggatattaaaaagcttagaaatgatgttaaagatggatatggaaacgccggcagaagccaattcaacagtgccaagtcgaccaatgtaggcggtttccatcaactgtgctaaggggtcaattgcctgactggcaagggcggggagagtaagagatataagctctcgtttgacatccacagaagcagaatctgaatggtgttggtcctgagaagtgaaggaagagggtttagcgccaagtgctatgaacggagcggagaggctggggctttggcgcaggaagtggtggtggtggtggtggtggccataaccgtaactgatatggttgcgcttgcgcaggaagggtcttctggggaaggctccatgatattgatattgaagttggtattgagaggtggtgaaatggatagcctccatgagcatcaccgcctgcactgcaagaaagaaaaaagttcaataatccatcaacatcgaaataaatatcaaataattaggcagactcgactccacctgcagcccacagaacgtatcgtcgccaactaaccttttcctctccctctgcaatacaaatagatagctgtctccgcttcgctcacgttcagctctttctagatgaaattttaaagcactatggattaaattattcaggtaagggatggtcataaaataaataaacaaaaattaatattttgactattcatttggaaattactagttaaatgttattgatttgactaacttacaagttaatccgactaaaataaacttataaatatttttagcttatttttagaaattagaatatatatatatatatataattataaccaaataatcaaatatatcgttttattttatattgttttatatttattgactaggttataatttttagcaattctaaccattgaaagggagggagtatgcagtgattttagatgcggagcctccaaaccagattaaacagatgttggccctttaatgttttaggagtttcttccacatttagttttaatgtaattttctttttctgggtttaggctccgctaattattaaaaaaaacactttctaatcaatcagattaacttatatatcaatatcaaaagtataaaataattttacattatcatctgataaaataataaaatatatgataaatttattaaattttataaaattatcttaaaaataaatattttttatctagcttcaagtgaacattagaaaccaaaaatagtaattcaatttttttaggacagaaatcaaaatcaaaatacttttcagagatcaaaattaacatttttttaagacacagaatatatttgtattgcaaaaagagggattaaagctgtaaagacattgtaaaattagacccaaggacaacagggggattagtacagaagaagaaaatgcctggttttactccccttctatacaaaacccattgccacgctgaggattttatccggcaaagctaacattcattcatgttacttgggatcaagaataatgatttcaatgaaaaataaaaaaaccatttttcttttaaaaaaatcaaaatcaaaaacttgttcatttaaaaaaaatgtcacttttaatttattacatttttcttttttaaaaaaacaaaatcaaaacttgttcatttaaaaaaaaataatgtcacttttaatttattacatttcacagttatttcattctaaaacattaagttttaaaattttcaaaatatatcatattttaaattttttgttagaaatatttctgttttgttaatttttaaattttaaaatgatttaatgtcacttttaatctattatattctgacagttgtttcgctttggtacattatattttaaaaattttattatgattatttatgtttttaaaatgtgttgttttgatcattttttggtacattatttttgttagaagcgttatggtccaatattttaaattttataatagttaagttagcatagtggtaactaaaaatcatcattattttttatatttaaaaattaaaaatcactcaataaatgaagaaaatatgaatttgaaatcacaaacaacaacaacattcactctattattattattattattattattatattattattattattattattattattatcttcattcaatttaatcatttaataatgataataatttcattcactaatcattctaaattacaatgggtaagggtcccttctcctttcgcctatcgcccctaacccaaaaagatcgttgccccgcccccgcttatgtcttcgccgcaacctccctacgtagccataattgttgcctcacctaacaacaacaattgtctcatcgccgcactgacaacaacgcattgacgaaagcgaagaaaaagaccaacaatgcctcatagtggatgaggtttgaccgatcggaccagtcataatcatcttccaatgaaatgcactatttaaccgctctttgtgctactcgtttttgtctttcccagttgtaaatgttgaatgggaaattctatatttattcggtctaatcgtgcacctaatcgtgcacgacagtggagatcttgctcgcaaaccttacaaagagtcacattatgacttcctcgttcatatctgaattaattggcgagataaggtcatatttttgtctttcgttgaagacactttttgctctgatctcccctgcctttgtttccaatagcatagctgatgaaatgttttgattttcctgtaaagagtataagaattttttgtggttctagggagattatgtgttgacgtcgttcaatctgtgtgatgccgaatattttaccttttcaaatttggaagaggttggaggagttgaaattttttagttgtttagttatttttaaataaaataaagataatgactatttttagtcgctactatgtaaagttaattattttaaaagacttaatgtctcttttggtatattatgttttgcatttttttcacttcgatacattaagttttaaaagttttattttggtcctttatattttttaactatatcattttggtctttttttaaaattaaaagttaacataacactaacgtcgaaaaattgaaaaaaaaaaaaaagagaccaaaaagatacatttaaaaaatgagcataatgaaatttttaaaacttaatgtataaaaaaaaacaactttaaaacataatggaaaaaatgattaagtctttaaaaagcctgaaatgtttctttcatacattattaatttgataatgcaccctttcaaaataaatttgataattcacccattaactaattgaaatattaaagtatgattctagatactctcaaacattaccttatcttagatcaatattaaaatgaaaaatgctactcagactctcctaaactctctttttaacactactaaaataatatcttcatcaacatacaataaatccgggaaagcctcaaggctccaatagattaagaagaactaataacttgagtaaaattttgtaagaccaatttgatcattttcacatttcactcgtcactatttccatcaattacatctattttgatagatagcttgtgcttcaactcctctctacatttacgaataaactttctccaattttggtttcgtaaccgtaacatagaggaatgaaacgcgagagcgagatcatgcaccacatgaaacacacgtgaagagtagtaaagagcaaccaaattttttgatgggattgcataaataagtactaataaagttaaggtgcagaaagaagaatttgtgccttaaatgttcatcaatcaatgtatgtcgttgttacttgttggcagtgcccacgtatccattaagaaatcacttttctctttccctttgattttcaatcgtaatattacacaaggaaataacagttatcagaaaattagaattcttagtacatgtttaagaatttttttttaaataattatttttcaaaagttattttagaaacatggttaaaaaaaataactttttctttgaaataaactcaagtaaaagcataattttaaaaatttattagttttatctacctgtttattttagtaaaatattttattcaattgtaaatacaatcaataaaaatggcctgtagaaggaacttgtgttaatataatcggagtaaaaaaataaataattagaatgagatacatacatgttatatgtttttcacatcccaatactcaacaaacacactgtttctaatcacctcttattgataatgatcttaaaactaatttatgtaatgtaaatagtgaaagaaaacaaagtggtaagtcgtaatgaaagctataacagagttgtgagtaagaatttgctccaacccaaaagcagaatatatataacagtagtaagtacagcttgaatataacagactttgagttccatatataggtagagaatccgctggttaattagttagagtcaagcatccaagaaacttgccatgcactccatatttagagtttagagatggaattgattgtaaacatttgagtcaaaatcaaacttggacagcgaaaccaagtactcaacgttaaatacaagattaacgcgagcttaattgaaattttggtttggtgagaaagtaaaatttacgaggggattagttggagttggaacttagaagttagatgactcattgacacgattgggttaattagatacgtatatattgttgtatatgcattgtatttgatcgatcattcaattccgcgcacaggtatatcgattttacgtgcggttgcgttcgtttctgttgaaaggtcgtcgtctcttctccaccttcttcaaagaaaaggtgacaaaatggaaaatgcgagaaacggtgtcgttgctgcgaatgcgcttcctcttcttccatgcaatcaatagcattaagcaacgcaatattgatcgaattaatgaaattcggcctaaggtacgtaacgacagcaacagcaatgaagagaaagaagcatcacactgagaaatccagaataatcggactcctggttgtgagtttccttcgaagtcggctcctccaccgcactctcatcatcgccatctccgcatcccttcttctgctcttcgccctattctctctgttcgctccgtccccgctaaatgaaatcaatcttcagactcagaacaatgaccaagttagatcacgattcgaggttccggtaagctattaagtagtaactaaaacgcaattgtcactattctgcattttattttgcttaatctatttgtgttggttggactttgaaggcgggtggaggtagatgcaggcgtgatttatggcgttcaatgcactcacgcctcttctatggctgcagtaatgccggtgtcaattttgcaagtaaagctaatcccaatcatctcatctcgcaaccaatttatgaatttaatttcggactttaaattgaaccaaattgtaagccgtgtgttcattcgttttttattggacgtgcaatttgattgcgtaagtacttgtttcttgcacttgcagatgctaatgtcaaaacgaatccagatcgatacttgctgattgccaccagtggaggtttaaatcaacagagaacaggggtaagcttcttcatcaactaataactatctattatcagctcatatgcaatacctatggtttcaaggaggtaaccaaacaatattggaagatttacctagtctttctgtatgtaaccaacatggatggttcttttctttctttatctgaaatatgtcatatgctattgctctaaattcaattgatatgatatgagagttttgtctggcggggctatcagacaccaatataatatgtgatttagggatacaaatttaagtgacatgaagaaggctaatttctgtggctggattattggtgcagataattgatgctgtggtggctgcatatcttttgaatgctactcttgttgttccagagttggatcatacatctttctggaaagacaccaggtctgtctttgccttgtaaatcatgtatgatatttttattggaagcaatattcatggtctcttaatttgtgtgctatttttttgcagcaacttttctgaactatttgatacagactggtttataacatttctccggaatgacgtgagaattgtaaaagagcttccggatatgagagggaacttcgtggctccatatacggtgcgtgttccaaggaaatgcacccccaagtgctatgaggatcgtgttttacccgtgctggtcaggaagcgtgtaagtcttcacatcctcaaaattatttgcctgcattccaccattaaaatctggacttttcctcccctgttttgagcctagatgctgcatgcctttctgttttttttttggtttattttatctatttcttttatagaacttaatcttgccaaatttataactccttaaatgcactcagtagtataaatatttcaaattgctagttttgggtaattttttctcttacgaactgaaatcttttgttattttttggcatataaatagttcaggggggaaaatattcctattcttttccattctgttgtatatgaatatcaaagcctcaacgcattttttttattatcaactatagtgcacgtttggttatatattaatattaacaactaatttccttatttttataaaaaaaaaaatcaggaaggtgaaaataaatatttgtttcttaaaataatctaattcaaacatgcggactttactagtgaaagttgcgttaattttacggttgagcaaaaatagttaattttactaacaagtatcttgtactttctatagattatttttaaatatattaaaatttaaatttatttaaaattataaatatacataatttattaaaaatattataattaaaatttaaaagaatagaagttaagaatagagtgtactaaaagattaatgcacttttaagtcggagttttctaaatgaatatgtatgaatgaatttacttgaaaatatatgacatttgatatgaataatgtgagtagagcttttaatcataaaaaatcgataatcgatttttttagtagaacatttgatatttgattaaacatataaataaggaacaataaactaaatgaagaatttatggaacattgattaatcaaaattgaaatttatttaagcaataatgacggttgactctcaaggaaaatacaataaggaaattatcttaagtagtgactggtgagtctgtaaaaaaagtagtgacacgtagtagtgtcttggaaatattatttaaaaaacaaaaaatcttcgaagctatcatatactgtgacaattgctaatcttcaactattgtaataagtacgttatggtggtgttcttgattcgatggatgatacttgaattccttgatgcatgcaggctgttcggttaactaagtttgattatagacttgctaatatgttggatgaagatcttcaaaggctgaggtgcagggttaattaccatgctctcaaatttacggattccattcaggggatgggtaaattgttggttgagcggatgaaaatgaaaggcaagcatttcattgctctacatttgaggtaattaagctttaataattatagccaagctttatttctggttcatttagttcctcagcaaagaatgcaatatgcagcatgatatcaacgtcagaatttcatcagcttctttaagttataaaattaactcgcattttgtaattgagacgctaagttcttttcatttttcatatagaagttcaatgtgattcaaactgatgttttatcacataggtttgaaccggatatgcttgcattctctggttgctattatggcgggggagaaaaagaaaaaaaagaacttggtgaaattaggaaaagatggaaaaatttacatgtaaggttttttttattaattacatgtaaaggttttagtagcatctaagaaatgagctccacatgtacgaaaattgattgatatattctctcttatttggaaatgggagacaggcaagtaatcctgagaaagttcgaagacatggaagatgcccacttaccccagaggaagttggtcttatgctaagagcactaggttttggaagtgaagttaacttgtacgtggcatctggtgaaatatatggaggccaggaaacgttagcccccctgaaggctcttttcccaaactttcattcaaaggagaccatagctaccaaggaggagttggcgccatttgtgtcattttcttctcgcatggctgcactagacttcatagtttgtgacgagagtgatgtatttgtaacaaacaacaacggtaacatggccaaaattttagcaggaagaaggaggtacttgggtcataaagccaccatcaggccaaatgcaaagaagttgaacctgttattcatgaacagaaataataggacgtgggaggaatttgcctctcgagtacgaacattccaggtaggctttatgggagaaccaaatgagttgagacccgggagtggtgagtttaccgagaacccatcagcttgcatatgtaaaaactctggtggtgggggaatttcctacccccaaaatcacaacagtattaccgagtttgaagagcagcaggagtggtctgaggtagcagataataagctcaatgccaatggaactaaaattgattcactccctcttctaatgaccacggaccaattagctgaagtgcaagaattcttctccgattaactctgttatctccccaatgatttcatggaccgacggtattgaatttgtacatatatattcagcttgggaaaaaatgtagactgtaagtagcaattgtatagagtttgaagcttctagaaggaagactcgttaaggcgttcgtttgctttgatcatagtgttaactgttcaggatagcagaatcgtcagtgttccataccattttagatatttttaaagatttagttgtacatgtccaaaaaatgaaatttacaattcaaaaactcttttttgtctttaacttgttttttcttgtgtggctttggtgcctcgcacccggagaaaacttgagttttattgtgtgtggttttctaaacgcacttggagaaaactaccggactatccacccttctggatttgaattgactctgtggcccagtacttgcatgaaccattcgtcttgctttgcctttctcatgggctttatcatagccttttattataccttcacttgattagtaaatttgtcttttttttcgattggtttaattaaggagcactttgaaaagccatatttacggcaatttctactttgacgagaatgtaaatttttttactaacaatatatgaaaattagactcttatttttataccatcattttaattaaaaatacatttcccttgaaaaaatatgttggtgatgtaaataaacaaaaattcaagattgtaagactcaaaaacatgttaaattgttttaaaaaaagaaaaaaaaaagaaagcaagaaaaaacaattaaaatctttttaattgtttttaaaaaattgatattaaattactgatatatccttattacaagtgaagagatgatggattcttttttccaaagatttacggtataagttgctaatgtactcatacttaaatacttagtgtgagtgcattagcaaactcctatacatatgtgataatttttaaatattaaaaatatttaatgtttttcatttaaccaaataaaattttattgtaaaaaattaaaaatattcttttaaaaaagctgaacgaaaaaatttatcctttacatgatagagaatctcaaacaaacaaagcattaatgtttaccgcagccacatattatggtattgatcccatttatttaaacttattttttaccagagtgtttttattgataaaaaagttttttttttgctttttttaaaataaattatatatacttcttaaaaaattattttttttaaatttaaacaattgacttattattaagtaattattgctatttttgtgctatttttgtgttctttttggtaataagaaaaatgttatgcataatcatccgttgttagtggtgtaattttttttattgacaaatgttattggttaattttattaaaacgttaatgaaaaagatttgtctatcatggcgtggcatttcatagctgaaagaatgccttcttacagtttaatctgtgaactgaaaaaaatacatttcttcttctttcaccatgttgtataattaaaccaacaaatagtttcctacttttctcccactaattatttttcctaggagactttgtatgagtgtttggctctacttaataaccactaccaaaaactgacaccaatcatgaaacccatcaatggacaatgacaatcctttgaaaggtgacgacaagtcctttcaagttgggaccattagcgtaactatgaagcgctttggtgttgccatttgcaatccaatcttattggctccaacaccgcgaaattatcaaaaggattaattattttttaaatttatcaaataagaataaattttaaattaatactagggaaaaactataacatctttaatagtataccttaaacaaaatcttgaattcaagattttctctatatctccaattaaaagaggtgaagagatctctaacacatgaagaattaattcttataaaataactcttacaatattcacattgtttaaaaaagaataagtttttccttgttctttctctctccttaaaatctcaaaataagatctatcaaataaaaaattagaaatatattaaaagatcttcaatcctatatagttcgatgggaactatagaaaagtgatcgattctaatttgagatataccattaaaaatgttcttactacttctaaaatcaaaatcataaattaattcaaaatttttatttttctattttttactaaaacataaaaaataacaacttctgatttttttaattaagactttaaagtcataaatattttaaattttttaaataacatttagaagtcacatatatatttacgacttcaaaatcatacttttttaaaaaataattattaataatttttaattatttttaatttttaatttatagttcaatatttttaatcaatatatttaatatttttgttactaatattaacaaataattttaacttaaaatttatcacataatattaaattgtttttaaatttttaaattaatttttaactttatcattaaataaattaataatttcatacagtattattaaataattttatttgataaaattattttaatattaacaatagaaaatattttaataataaaaataattgttaaaataaaaataacataatacattaatataaaatgaacaatacaaactaaatacaagcataaaattaaaaagtacaaacaatattagtcatcaacttacttgtatagatacttattataattatgtctttgagttctaaacaatgagtttttcttaggcttatttgaaattgatttgttcatcttattatatatatgattaatgattgacattcacaatgtgtctagtcgctttgaatgatcaaatataaaatataaacttaaatattgaggtaatttaaatttatctttacttccactttaatattttttatttaaatttaactctttcgtttacattattttttaaatttataaaataaataataatccttaaaattagtaaaaaatataaaaaatattaaaacaaatagtatataaaaatatagaaaatattaaataaaaaataatatataaaaatatagaaaatattaaataaaataatatacagatatagaaaaaggtattacttgaagttgtaaataaatatgtttatgacttctaaatagtatttaaaaaattaaaatatttactacttcaaaattgtaattaaaaaaattaaaagtcatttatttttttatgatttcaataataaaaaaattgtgaattaatttatgaatttggttttaaaaattgtagaataccatgcaacttacccctttgtgaatattaatttaaaatttatcctcatttaataaattccataaataattgcccctttgttaatttcggcccccagcccccaaactcccttacaatcaaattgtactcagtagttacattaaattatgaattaacacatattctaataaataaagtgcatttatgattaatagttggcttttttatattataaaaaaattatattactttgtttaacaaaaaatggttaagttttttatttaaaaaagttgaaaattactatattcgtctattgaattaaaagtgtttaacaaaattatttattgtaactaattaactataaaataacatgaatactatatatgatattttaagtttatgaacaaagatatagtagtaaattttgtaagattaattttttattaaaaattaaaataaagaatgtaaataatttaatttttttaaaaatgcaatactaaaatgggcggtggtggtgaggattcgtgaaaaaatttagataaaaacaagtattataaagatgaaaattaaggtaaataaagaaggttttaaaatattaaagacaaaatgaaaataataaaaaaaatgaactcaaagtcttaacttttaaaaacataataaaataataaaataagttaatttattaaatatttttattttgataaaataaattataaagtaattaaattaattggttaaaaaaatagtcatagtcatatttatatatatgtatggcttttgtttttggtacagtatgtatggcttgtttggtatagaagatggaaataagtaaatgtgtcagcagttcatttagtaaatatgactatgactgcatgcatggtggggactgagtgggtctgcattgcatcacatattcacatattcacatgtgctctgcacgtgagtgtctgaacccgtacgtacccttctttttcctctctgccctcggctattagtatcacttataaaacacaatgcaatgggtttatttaaagatttaaattcaacatgaattaaaaaattgaacagtgtaactaaaacttttatagtaatagaaaagacgggggattcgtataaagtgaatcacatgcacatatacttgtaccaaacaaggccaaacataaaaaacatgaaaattcatgagaaagcctttgtgggggccattgcaattcatgagagcaagagcaataacacatttgaaatttggggacgctccaagggaccaaggctctcctaactttcccacattcctatgacaacattatgattaaaatccttgccccatcagctcagtggaaagaaaacaagttcctcctctctctgctttcatgaccctaaaagattggtaggcctatatgcaggtgaaaccacattttaggatttttttttaaacaattattgaataaaaataaattttaaattaaaatttagaaagagaaaaatcataaaatatctcactatttttgacttgaaagtaataaattattttataatttttttattgaaatcgtaaaaagatttatgattttttaatttttttaaaaattttgaagccgtaaattatatactaaaattgtaaataaatttatttatattaatattttatattttagtatattatattttttatatttttatttaatatattttctataaatgaaacactaataaaataaagttgtgaatatatgtgcgacgttaaagtcgaactagttggaatatactatataattagaagaaaaaaaatccttaaaattaggaaaaaaatatagaaaatattaaataaaataatattaaaagatataaaaatattaaataaaaatatataaaatacaaaaataaaaatattaatttaaagttggaaataatttactaatttaaggtcgtactcaaaaaaacttaaaacatcataaatttttttttaccacttttttcgtagaaaaaaaataaaagttgaaaaatgatttacaattctaagctcagaagtcatgaatatcatactacttactcctttctcgatatttatttaagtttatctctatttcataattaaaaaaaaaaaaaaaaaataccctgaaggttcgtttcgcccttatccggatattctccacctgatcccatcctctcttttacttctattttttctaaaaagaaagtgtccaccttcgttttcacctccttaattaacttttatgtaaaataatttaataacataaattacatttggcttgctagttttcttcttgacctataatacatggacatcctttaattataaatacctatataacatcttttgtttcttttcatttctttttgcagtattgcattttttatcatctttatattttttcgtcaaaaatgaatctaggatcccagaggtcagttggaacaatctatttaaaaaatgaatttaatacataaaaataaggtagtaagttcaaacatataaaaataaaaggtgtccgatattaaattttaagataaatatttatgattttattaaaataaaggggtatatatatttgtttaccctcacatgacaataagtgagagggttcaaacatataaaattaggtgatgcaatatgaaaaatataatattttaaactaaatacatgtgactttattaaaataagggggtatatttatctagcttcaaataagagtcggtttgtcgttgtttacaatgaaattgttttttctgttgtattttttcatctcaaatatatacaataaaaatacaattttatcgtctatttcgaaaacagatttatatttctattattgtttgacaggacataacttttgactcatgttcaattttagcttatagtatgtctatttcatgtaacttttcgagatgaatgtatggcaagtacccaaattctaatatatttttttttttaagaaaccttccttctatgaaaaaatggacttgaaagatttaggatttggagtttggagtgtaggcatggcagcgggacccgaacccgtaggtacccgcccaaatccgccccgattttaatgggaaaaaatcgattttttctgatttgggttcgggttcaggtttttcctggtagccaaaagcgggggcggggcgggggcgggtatggggttactgatacccgccccgccccgcccccgcccccgccccgtaataaataatattaaaaataataataataataataaaaatattattttctaattttatttaattgaattgactgattttgttttgtaattttaaaattatgatatcatattttaaatgtgggtttgttattattatttttttgttacataattaacttttttatccgattttttaataaaaaaattattttattttttaaattttaattaaatagcgggggcggggcgaggcggggaaaactcgacccccagcgggggcggggatggggatggggtttaaaattcgacggggaacgggggcgggggcggggagctggtttgggggtgggggacgggtatgccccgccccgttgccatgcctattggagtgtaacgaaaaaagaacggagaagggagtgggggtgttgtgagaggatggtgatggaaataagggaaaggttttgggtgtaggaaagggaggagggtaacaaagacaatttacattttcttggatgagaatatagcttattttgagagactataaatttgagagacaacagcttattttcttgagtcttgacctataaattacattaataatcaacaccgtcttacttaccataaattacatttgtcttgctagttttcttcttgatgtataatatatatgacaccttttaattattaatacgtcttaaatctcactttaaataaagatgaatatattaaatctcgtgtaagtgattgacccatatacataatattttatcttatattaatatatacaatgtcgaatgtctacccaaaaaaattatacaatgtcgaataattaactcatactcgtattatgttctcttaaaaaaaatgaagcaaactaatttttttcaaaaattaaaattaacttatatacctcattttttataagttggacgagtttttataaattttttattcattttatctttttattttatttttttaataagtgcttactgaataattttacccaaaaagacttttttaagatgatttttgattgattgtgggtgtaaaaactaaaactttataataagtatttggacaaaattttaaaagaaaaatagaacaaaaggtagggcattcattttcttggtgaataatgaaaaattgaaggaaaaaaaaccggagtgctgcaataattgtctcaacagggatttgagtactggcgaagcttatgatggagtggttaatgcaagcaaaggcatccaatcaacaactcaataatgataaaataaattattggattgggcaatattgattattactgtatgactctggtagcagtaatttgatttcacatttgcatagatatatgattttcgactgtatttatattctccctcgcgaaaatacaatattgtatgtcaaacaaaagttacagaaccgactcaattcaaatacggcggctagtccacaaggatttgcaatattgtaatctggatacatgacatatacgacagaataattatagatcgaatattaactacggattacggaaattccctaagacgaagatgcatgattgttattttctctttgcatgctttttgtggatgctggtagaaactagcatgcatgtagaatttagaaacgtaaattaaacagaagaacattgtgaaaaaaaagaagtgactgatgagacaacgacgtggtattatggcattcaattgttgtttgtttggtgcatacaacacattaccaatcatggcttgggggacccccccaccacacacacttccaaatcacgttaccacccgcaatcaatataatattggtgccgagatttatatttgagtaggaaaatgttgtctctatataacacaatagtctctcacacacacacgaataatatatatatatatatatatatatatatatatatatatatatatattttaattcttgagaaatagttcattttattgtttaaaaatgcctttagaccgttagcattttaaaaaatatatgatagagtttactgcctggtcatcatggtcataatccattggtgattaatatctctccaatattttattctcatcctatgcacaacactataacaactgaaatcagaatcaatagtttgatcaggtgacctgttcaaatgattatatgaaatttgtggtgtatttaagcatgaggatcccttgtgggtctatatataaagatcaaaagtctttctgttaacatggaagccaaacatgtatttcgttgtcgtgaaatggtggaaagcatgttggcagcaatggataaactcttaaggcctaacaatgaaaggcatattggtagctacaatggatatcagatactctggatgaaaaaatgtttttgtttgaaaaaaaattattatataaaatagactcacacttaaggaaaagaatattgaagctaagatataaaggtgaaatctcataatagataataattaataagttaagcaatatataactaaaaaaatcactaattaatttaatatattaagattttgggttgaaagtgatgttttacttgtatgtgtatttgtgatctaaatcacaaattaatctaatgtcttaagattttgggttaaaagtgatgttttacttatatgtgtattgtgatctactgttgaaaattttctcagagtttttgagtattttatcttccaaaatttcacaacaaattatttttttaattaattattttcacgtttttatgctaaaaattttcttcaaatatcaactgtttgtactgttaatttttttttaaaaaatattatattaaattaccagatatattttagagtaaactgttaagtgtatattctctttaaatatttcttacacaatttatttttgtcaacacaatttcttcaaatttgtatgtgactaaattcacaacccgtagaacaagataatgaggatatgaaggagcagatataaagtgtgtaagtgcgagtgagccaaatggcaatgacacctcacacctattcgctgattggtacagatagggtatcttctcaatcttattggctttcataggtatttcatgtttgttctcccactccattcagtaagtgcccttgacaggatttcttgttggacatctatcttttcaaagcttcatgattcttctaataataataataatacatgggaagctgaccatttggattgttactttaattttattaaaacaaaaagagctttatgagttaattattagtattacacatcatatgaaagaaagaaagaggcatcaaaattgagagaaattaaatagaattgaaatgatataataacaatataaaactaattttttattagtataaacatttttaataaaaattaaaatagtaaaataaatataaatataggctaaattatgttttaagtttatgataaattaatatattttttttgagtctctaataaaaaaattattatattatatttctaatatattaaaattttattttaggttgttgttaattaagtgatgatgcattatttttaaaattttaaattctgatttctagtagctaaaaaattatcactatttattttaaaatttaaatttataattttggatagctttaaaatcattagaattaagtaatgcaaaaaaaaaattcctcaaatcccaatcttcatcccataataaataaacgaataacaaattagataaaaaaaaaaaaaaagagttatggttatcagatagagagaagccatatctcagattaaaaaaacaaactcagaattaataacaaataacattcaaaccaagaagtcaagattcaacccaaatcaaagtggacaagttagatagtcagatagaggaatcaaaaatcacacctttacgattaaaataaaaattgattccactgtcagtgacaaaacgccaccatatctgcggatccatttctcactgactaaacgccaaggtaaatccgtttctcagtgggtttttttacgtagcaggaaacaagatttgtttttttttttttcattaattaattctagcggttttaaaaccaccgaaaatttgtcgaaaattataatttaatttttttaacttactcgatatttaactaacagtagagacttaaaacaaaatttctaatatattgtatatctaacttaaaaaatatattagaaattcaaaataaaatttactaatttattagtaactaaaacatattttaatcatatatatatataataataacatgatatactgtattagacataattttattcataaaaaactaatataaattatgaatgtaatattaaatatcagaataatatattgtatatatttttaatgtaatttaatatatatatatatatattaataattaaatttaaattaataaatatattaaaataaatgctcctgacattttccatttacttggtgtttggaaagatccatggattcggtctaatgatagttcaaatgctccatcagttcctctcatgggtctcgaaaatatgaaagtaagtgagttattggatcccactttgaactcttgtaatgttgcacttattcataatgttttttcccaaaatgacgctgaaaatatcttgtctatgcctttacgtttaataaacactcctgctgataagattatttgaaagcttagtcaagatggggctttttctcttagatcttcgaatttttgtatcatggaaatttttttggataacaatcatctctgtgaaagtggtaattggatggctatttggaatttgaatatatccttgcaaaaatgaaagattttatttggagaatagctagaggatgtttcccaaccagccaaccaggcaacgattatctactatggtattgaaaatgattggcattctttcctaggctgcactcatattcaacatgtgtggatggaagcttctttgtggcatattcttcaacatgcttttgatactccggaagatatgcgtaatttcatatttcacatcccggaaaaattcaataacagccaaaagtggagcaaattgttactgtactttggtgcttatggcggagaagaaagggagaagctttaggatggagctaataaacctgctggattgtctctgcagcaagcttttcagcagcttcaagaatggaacacacaccacaaacggcgaaatatacttccacctcaatctgaaatatttgaagaataatatggatgttattttttttaatgaagacaacaagtttggtgttgctgctgcagcaacttcttggttccaaggtcagccaaactccacaagaggctgaatctatggctctcctatttgctatcaactggaaaatagatcagcaactgggtaacattatcatagagacagattgccaggttattcctgatgctttcaaagcaaaaccatttcatgatctcgaagtgggttgcattttaagaatctgtgataaaaaattttatgaaattcataactgtagtatacagtttgttagtaggcaaaccaatcagatctctcataggttggctagagcatcaagatcttatgtttgtctacaaatgtttgatttcagtccttcttgttttcactctttacttattcataacttaatataagtttgcttcattaaaaaaaccatttttcgtttactagtgtatttataaatgactttgtgtgtttttattttattttattttttataagcgtgaactaatattttaacacgtgtaatgcacaataaacatgtttatattatataattaaattttataataaataaattcttttgaaaatttatattatattttaattaaattttataataaataaatatttttaaacatgtagattgcatttaaaaattatagtgaactaatattaaatttaaatgtagtgtattttaatgaaagtgttctaaacgaattgttacataaatatactatagagtaatgatatacatacattcatctattttaaatattttatcaatattttttattttttttatctttcttctaatcatatcaaaaaatttattatacatataatttttctctttttcaactttctctctaaatataagatagtgtcatgagtgttaaccaaaaatgtttcatatgctataagagattataccgaaacttaattacttcgtgttgtgttagttgggttctccttcatctttatgtgctaagtaaaaggatgtgtatttgcatagattctgatgccaaatcaaaatttagtagagtaacaatactgatatatgaattatttatatctatttgaggttgtcatgtagtatttgtagagaatatagacattatgttgtgtgattttgagcttgtcgtcacacatctaatgtaaaaaatccgttgcaaaatacatagttttgtatgtaaggcttatgtttacagaggccgcatgattgacaatcgtggctttgtgatttaaaggagtaatacttaggcgacgattattcttaaaaattgtcatacaagttgtgtagctggtcagtgcaagaggttgattcagttaagtaatcttctgctgagcaaaattgtttgacttttttttttttttttttattgaagttgtgaccttattacacttttagaacaagtggtaatacaatattaattatagtattaagacttgaatattccaacaacaaacaatactcaggaaaagtgtggcaacagaggagggggagtttggagaacttttttgcttatgggagaaaaagttattcataacgttaattaattaggcgaacaaatgtggaatcaggtttaatatataagaaatttaagtcattgaaagtcaaaagaaaaagagttggcatgtttaacataaaataagaaatatcacattatattatcaatgagagcttcgcgatatgttatcttaagcaaatcgaaggaaaacaatcaaagaaaataaccgtatggaagacctttaattttaatatgttggtatatataagcatagaaagaatcctaatgaaataaaaatacaaaaaatgcttcctatattagttgtaattaccttaattaactcaaattaaattatattggacaatcaattaattgtccttttatatttgtttaaaatattaaaataaactgtgatgaatttaaagcatttaaaattataaataaatatatagtacataatattcagtaaatatatatctaaaataaattaatgttgatttaaatttttgtattgaacaatcaattaaaattgtggatgtgtatgtcttataatagtaaaatatacctgtgtgaattgatttaaattttactatataaattttatttgtacgaatcaattaaaattatccttaatcattattactaatagaatcatttaaattttacacgtatatttttataatagaacaaatttctatatttttacatttttactcttattaacaaaaaatatatcatatcaatttaggcagttcttatatttactatataaaatttgaaaaaatagaataaatataaaattagaatatttcaatttacaagattgatcctcatatattatatttaatttagaattctataagtaataaaataatataaaatctacttaattaaattattttgtgtgaatgaatatgacgtgtcatgtgatatcaactcataaaataaaatgaaataaaaatatcatatcaatttacacaatttttatatttactctataaaattttaaaaaataaaataaatataaaatctgaatattccattttatactattggtttttatgtattataactaatttaagattctacaattgatttaatggatttaagattttattggaaatagaataatataaaatttaattgaattatttggtgcgactgaatattgggtgacacgtgatattaattcattatcactaaactaaaaaaaattatcgagataaatgagccctttaaataatttttgacctttcaaaggattaattcttgaaaaaagaatattctacatatctgactttaacatcaacaaaaaaatagaagcaattcattccatgatacgtttgccgtaaacacatccatatgtggacaattctttggtattttattagaaacagatgattgagcgggatagtttcattagtttctgcgtctagggcaacatgacatttatattgttttaaatacttttgtttattactttgaaaaggcattgaatatttttatgtttttaaaatgttaaagttccttgttcatttaatatttggagggaaaatatgaaacaataatataaattaaaatacataactgaaacttttgattttacagttatttaaaatattttttcaacaatattataatatcattcttttgtttatatttatatatcataatttaaatggtttattataaatttaaaatataaattatatatgaattaatatttatatactactataaattttaattatataaaaagtattatctcatgcggtagaataaaatactattaagaaagtatcattaaaaagtatatagcaattgtgagaggataagatggtgtagtatttttgaattgaaattacgtgttttagtagaaaaaggaaacaaaattgtaatgtagtagttcggataaagctgaaagaattgaaggaggcgacgatattcctagtaggaggaatttaatataataagaaagcagatggttgtaagttgtaaccgaaaggaggaaggggcataaccggaaaaggaaataaattagagcggaggcaggcgtcaaaggtcaaattttgaagcttccaaagtgggaatatgtatgttaggtgtttttcgcggatgatatcagatgttatgttccaaatttcactcttaattaaacacgaggaaactgtgatgaattgagagaaacactagtatataaatagagttgaaaatgaaaatgaaaatagaaaataaaatatttgatataactgtataataagaaagaagggtgaagcctaaaatgaaataaaagtttaaattaagttgaagaaagataaaagtgagagagaacaccgacgaggcagaaggagagagagagagtaataaaaaaaaaaaaaagaaacggacgaagaagtccgtgctggcaaaagattccctgattcattcactaactggttgttttatgttggtgcctgcctgcccagtaactctactgtactgccccgcttcatagttgctactgctctctctttctttcttccctgtggctgtggtgttaaatagcaattttggttacaattagaaaccctaaaagggaaagggaaaaggaaaaggaaagagccatggggtgtgccagctccaagctggacgatctcccagcagtggccctttgccgggagcggtgtggtttcctggacgaagcaattcaccagcgctacgcactggccgcagctcacatcgcctacatcaactccctcaaggcaattggtcactccttaaaccttttcattcagcaagacatgctaacaacaaccgatgctcctccctctccctccccttctccccctcacaaaaccaccaaacactcctctccttctcactccgactccgccggctcccacctccacttccactccgactccgacgaccttccctccctccatcattcccctgaaccatcctctcctattcgtttaggtgcttactactcaggaccagatcatccccatccccatcttcatatgaattacatgaagaataaagccgctccttcaattgtctacgagcagcgccctatgagtccccaaaccatgtacgttggagagtcctcctcttcctccttctacccttaccagtatcccccttacccctacacctacgatccctattcggccggactttcttcctcgccgcagcgccaggccgtttccaagccacccccgcctccgccctcccctcctcgctcctccacctgggacttcctcaacttcttcgataacagcgacgacaagtactatccccaaactcattaccctgccacggccacccccagccgcgattccagggaggttcgagaggaggaggggatccccgatttggaagacgaggattaccaccacgaagttgtcaagcaggtccatggggatcagaagctcgtccagcctcctaagcacgaacccccaccctcctcccaccacgacgtatatgatgatcatgatattcatgatgatgatgatgatgatgatgaggacgaagaggaggtagaatatgaggtgcacgtggtggataagaaagtggttggtggagataataatgatgggaacaagaccaaggagcacgccgcattccgtacccggcgacctggttcccggaatccaattgaggttgctaaagagattcagattctatttcagagggcttccgattctggtgcccaaatcgccaagatccttgaggtcggcaagcttccccacaatcgaaagcacgcagcttatcaaggtaacattaacagcatttctctctattcattattcacatttcgctcctcacttacctttacctgatcacgtcctgtctaccagcttcttccaagatgttacatgttgttgctccctctttgtcccttgtctcctcccaaccttctacttccaaagatgctgaatccgcctccgctgctaacatggattttaatgttgatctaacaaccggggcacgcaatctttcctctacgcttcagaagctccttctttgggagaagaaactctttaatgaagttaaggtatggatcttaattcaccaatctcattccattgctttcagtttttccacttttcatctccgtgaggcaatttaatcctgctgctttcgcatcagctcttgtatgttctaatgtaaccaacctgtgctgataatttgagtgatatcaactgctcagaagtcttttatgccataagtgaaacattgttaaccagtgtttacaggtttccaaatagcttttttgttagataaataattaggaagccataaacaataagtatagcagtagaataagttcaaatagaatcataacacatacaaagtttataataatcaattaatacaaagcttaaaatttaatagtagaagagtttaaaagagcctagattgaagtgcactatgcgctatccttatagagaaaaattcccccactacactggtacaataaattaatatgcatgcgctcctctcccaagatacgacaacccattaatccaatcgagtatggcgaaaggatcccgaaccaaagaacaccatgctccaaaacatatagttgtagtaatataatgtaattttataaaaaggagaaataggcaaatggtattttgctgtaggtgtgtgcctatacgttctccttatttttccataagaggaagctatatataaggggggaaaataaccaccaaatgtgcagcccaagtatcacaactaacaaaccagtaacaaacataactacaaatctcaataacgtgcaaaacgcctccaacagataaaaagactaaaaacttagtcaaacacaatttctaaaagataggaataaatagatagggaatagtttttatctttagaaaaaactgattgagaaaaagaaaattatttattttaaattttaaattataggaaaatattttccaacatttttttcgcacgttcatttgtttgcaggcagaggaaaagatgcgggtcatgcatgataggaagtgtcgcaggttgaagcgtttggatgataggggttctgattttcataaagttgattcaactcgaactttgattaggaatctgtccacaaaaattagaatggcaattcaggtggttgataagatttctatgactataaataagataagggatgaagaactgtggccacagctgaaggaattaatccaggggtatgtgatgttaaaaactaaccatttttgttatttgttcaagtcctaaatgtctctctgttcatgatgggcaactctgtatgtagggatggcaagtaatcccatatctatgctccaatccaatccaatccttccattccccccccccccccccccccccccccaaaaaaaaatccatttcttcttcctttccatcaccatgtgatccataaaatataacatacttttaaatgggtgggttggatatacgtccctaattttttttattaattgatgggttggatggttttaattaaatggatcaggaatggattggattttttcattatattcccaatggatcataaatatgtgaaaaaggtttagggtcatgtgttttctacacaaaatttgatttgatgtgcttctattttaggtgcttgtctattatcattgaggtgatatagaatgacctcatgcaaaatgtgtagatcatcttataacgagtcagtcaagcattttctgcctgttcagtggcactttccacttttagctgtttgtattggcttccagtaactgaactaattatgtgctctacaacattagacaaagattgaatggaaggggttattttgttattgagattccattccataggaatcatctcctctatatttcaaccctatgaaatgaactgaaatattgatgcacaatttcccagaattctttgataaccatggtgaaatgtatatatcctgacgaaatccaacaaatccacctgcaatctacacatagtgctgatagaaagaagcaaatacttggccatcttctaagaccatttctgataattttgataaatcctgctatttactctgatgtatgtttataacttccaaccatatgatcaatttggtggtttatctgtccaatttgtggataatgttgtgctcgagttgtcagccagaggaataatcattctttacaggggagatgatgcaaccacgcaagagcttttccaagaaattattactctccaatctacaagaggaactaaaaaccttaaaatatatcctgtttatccttgtgcaagtggattgagcacttgaattcagtattctccatccagttttccgttccagacatgtgtgatgttgtcacccatgcgcttttttattcttcttaagtttgtatggttgaattaatgttctcattttcttttgaagttgctaatttttttctctgtcctttgggataagacatgcatgtgagatatccattcatacatagtattggataaatgttttgccttttctcattgtaatgtaattatcacctgagaattgtttgggtgtctcgatgtatatatggtataatatgagataagcttattttcaggttgaccagaatgtggaaatccatgcttgaatgtcatcatgatcagtgtgaagcaattagagaagccagaatactgggttccattggatccaggaagaagagcggtgatagtcatctccaggcaaccaagcagctcgaacaagagcttatcaattggacattccaattctctggctggataagtgcccaaaaaggttatgttagagcattgaataattggctgctgaaatgtctcctgtatgaacctgaagaaacaccagacggcatagtcccattttcccctggtaggattggggctccgcaaatatttgtaatatgtaatcagtggtcccaagctttggatagaatatctgaaaaggaagttgttgattccatgcatgtatttaccatgagtgtgcttcagatatgggaacaagataagctagaaatgcataggcaggtgatgaagaacaaggatcttgagagaaaagtgagaaatatggatagagatgaccagaagctgcagaagcaaattcaagcattagagcgaaaggtggttctggtatctggagaaggtaaaggtctttcagtttctgagaatatcatatatcagagtgacaaaagcagtagtctacaggctagcttgcagtgcatttttgaggccatggagagatttactgacgaatctgtgagagcttatgaggagttgctacaacggagcgaagaagaaagtgctgcccaaaatcatgagagagtttcatagggtggtgtagctgatggaagttggaatcatattatctttgccatttaccgagaatagaaactagctgatctccctctactaactattctttacaacagagtcttgggaggaggggttgggtttgatttctcactacgctaagctaactgcattggagctgaagatactgctgggatgggacagtggaatttattgtcaaacgaaaagataagtgtgaggtatgaggcgcacggttgctttttgggtattcagtgctataaggctacaagtggagttgtgctgctaaaagacaggggagcccacaaattataacatctaaatggttcttctttctgcattagaaaatagaaatgaaggagaaggacggactttcaggtatagaacccctgcaactggcaagtcgtgtgctagaaggtgttcattgctcaaattgaagcagtaaaattggaacaagtctcgttcgcaacggagtggagtaacgcacgtcactgaatgcatgggtgttattggttcctgtataaaaacattcgtttttaagttaaattattgtacagattacctattaacactgagcaggcttgatgaaaaagcatttagaataaaatatttcttatagccatttgttcctcaactggaataaattgctgagaactgttcaaagaatgaaaacagaactccgttattaaatgcaaagcaacttaaatctgacataagtggtggtgggctcttccgtgaccaactattgttcatgataagatagacaacggagattggaacgggctggccaaaccagactccaagagctctcaaagtgaaccaacctcttcaccaaggctgctcaaaataaccagttttaaaaaaataatcatacaagtagttataactaattttatagttacggttatttttattgaaaaaatagttataattataaatctataaaactataactagttttatagaaatgattattttaaataacttatttttattcattcaaccggttatgtaattgattttaaatataacttgttaaatagttgattatgcaattagtttattcataatctgttatatatctatattttaaaaacaataacaagttatatcaaattataactaattgtggtcataattataatattcacttataatctagttatttattagagcatggttgaaaatcagctaaaaaaataagtcatgttgaagtaatttatttagagcatgttgaaaatcagctaaaaaattatttttgagggaaaaatacttttacaaaaggatcaagatctttacgttttctttcattttatttttatcctttggacctacattgaaatgtataacacaacaatttcaactacaaaccaaacatgcatttagggtatattagaatttttggtgggagggtccaaaaatatgtttaaaagtaagctaaaatatatttgtgatctataataaatatctaaattttttgtttactccttaataaattttttcttcatttttactttcagataaaacaataattttatttttatccttgacactttttttagtttatgataaattagcaaatgaacaaatacaaaatttactaatttatcatgactaaaaaaagtgttaagaaccaaaaataaaatggttatcttattagagatttaatgaagaaaaaaagttatcaaaaaaaaatacaaaattcaggtatttattaggtttacaaatatattttaaccttaaaagtaaaatgattttgaaattatgtttaattaatatctccaaaatcaatttagaaacttaagtttgacctataagattaatgtgcaaatgaaaagagaaaagtttattagacaacatggaatcctttgcaaatcactccaccttgcacattaactctattaacatttatatatttttttcttctatttttcattctattatattatatcatctatagtacttataatgtttttgatccttttttgtctctctgtcaaatatcatatggtgtactctcatctctcatcattttccatttataatccaactttttggcgcttgctattgtgaggtgttaatgaactttgcattttgttcgcctataataagtaggtgcagaggtgttttcgagggattggattgtcagtgctgctaatctttgtgccaccctacggaactgaattattcccatatgatgttttttacttcaattattgacatacggtaataatattttgtctgtaaaattgtattacttaattgcattattttttttcatatatccgtacaaggaggggggcttactgcttacgcgcaagatttttattttattgttgtccttttcagcccttgttacgaaattgaaatgtgattcttgcgttgcgtggtacattgtcatttaacaaaagctgcacaaagatgttattggttattattgaatttgaatagggaaattttggctagcagacattgttaactgcttatcatatgtaataattgattataacatgcatacgttacattatttatgaaatatattttataattttatttttcttttttaattatatgatataaatgtattgtataaatataattttgactaatgtttaatggaaattgttgtattaacaacactccaagtaaacgtacgaaagttggtgtaaaatgtaagaaaatgtgtcatccattgtaggcttttttcctaaaagggaacattttttttttctttattaccatttagagggtcaattttaaataattatctaaaaggggataaatcgtaatagatgttacaaattttaattttttagtagaagtcgtaaatgagtttacactttagtttaattattttttaaaatttacgattttaaagtcgtattaatatttaaaaaattgaagttgtaatattatttactactttaattttttttaagaactatgacttgaaagtgataatgttttttacaactttcaagttgtaattttttttcaaatattaccattttaaaaaaattatgaattgaaaataataaataatattacgacttcaattcaaaaaagtaaaaaaaaaattgatacgattttaaagtcataaattttaaaaaataattaaactgaagtagtaaattctttaatgactttagttaaaaaaaaaatatgttacgggttttaactcaaaagttgtaatcgtattacaacttatacttttttggataattattgaaaatcgacccccaaatggtaataaagaaaaaaaatgttctcttttgggaaaaaaaaagctcgatttgtaggattccatgttgtatgataaacattagaaatgagtagggcaaataaaatcataggttaaattagtttgttggttttctaattgattttttaagtttgatttgattttttaattttttgagatttaatttgttctttttaaaattgatttattttgattctactatgtctaaattgagtcaacggtattaagaaattatattgtgactgctgaaaatcatttaatgataattttaaaccgtcgtaaaatacatatttagacactaagatcaaatttaaatgaaagaatcactcaagttaatgtaaacaacatgatcaaattaaactaattttacgaattagaaaattaaactgaacaaaaacaaaatcagattactaaatcaaatcaattttaaaaattagatgactaaattgaatatgaaaaaaaaagcaacatatccaggggggggaattaaccaaaattatataaataattataattataattatgtttggcggtcacttcttagttcatacctatgttatgcagcacgaactctcaccttaaaaaggaaaaggaaaaactttgacttgattagaatatgcatcccggcacgtgatcaatggtaatggagaaaacatttcacgaaagggagagacaagtcttaaaatgcagcattgagcaacttaattaaacggatctgcgcagaagcttccctccaatcagattattcttttttggtttcagattctcaactttaggcaagtgaaaaggtaaggaatcagatttatactagaaagaacaactttcagccataacaaaccaagccttttaatatttcaacacatatgatttattagataaaaatgtaccaaaacaacaataagttattttaatatataaaatttattagataaaaattagatttaaatgtaattttgatttttctattttattcaattcacaattttgattatttattttaaaataaaaatatttgatcattttattttaaaaatttataattttatcctcatattttttagaaatatgcaattttaatctcatctttaattttatttgtattttatttcttacattataattaattaaattatttttaatgatattttaaacaaatatgttaaatttaagatttaattaaatcaaaataaaataaataaaagatagataaaattaagaatttaattaaaattaatttttaaaatcatacaatttttaaaacagaaaagccaaattaaaatgaaaagattaagcaaaacaaagaaaacaaaaataactttgtgtgatataaattgaacccatatgatgtttatcttgacttgacgtgtctaggttgagatatattagtcggcaaggtatcattggtggagctagctagatttggaagatatttgtaatgtgtcggaaaaaccaggtaggaagtcagggaagattttacttttccgtaacaaaaaaagtggtggtgtcgtggtgaatatatataaataaaaaagaaggtaaaatagtaacaagaatgggaagcattgatttgggtaggtgaagactgaagagaagcagaataagtaagatagggttgtagttaaagaaagtatggataaaaaggtaatattgaggaagagcatatgatgaagttggaaatagatttaatagaatattaatgagtgctggattgtaataagtaaacagtgattagtaattagcaacagtgagggtgaaggaagggaagggaagtgaagcatagcatagaaacaaggaaactaaaaaaattgccaaaaaggcaaatcacgcgaacacaagagtagaagagtatagagtctgtggagatctcattcatgatcggtgataattgttgaagagagagagagagaggatgggttgttgccaatcatcgatgttgctgagagtgggagagagggagactcaccctgatcaggagaaggagaaggagaaggagagggaaaaggaaaaagagcaagcgtacggaagccaccagaggcagtctgagggcgagaaagagggggtggatttctcgttctcggagttctcgctggcggagctgaaggcggccaccaacaatttcagctccgagtatatcgtgtcagagagtggggagaaggcacccaacctggtgtacaagggtcgcctccagaaccagagccgttggattgctgtgaagaagttcagcaaggctgcttggccggatcccaagcaattcgtcgaagaggcttccggcgtcggcaacttgcgccatccacggctcgctaatttgatcggttactgctgcgacggcgatgagaggcttctcgttgccgagtacatgcctaatgatactcttgccaagcatctcttccactgtatgtgtaacttatctgtttgttatctgtactagtgtttatctcatctgttcattcattcattggttcattgattcaggggaaactcagactattgagtgggccatgcgtttgcgagtggctctgtacatcgcacaggctttgcattattgcagttctgaggggcggcccttgtaccatgacttgaatgcttaccgtgttctcttcgaccagcaaggtgatccccgtctctcttgctttggttttatgaagaacagcagggatggcaagagttatagcaccaatcttgcttacacacctcctgaatatttaagaaacggtaactaactcccttcttcacattttcttttttacttttttatgtataacaatacttctctcaatcatatttcttttgttacaggaagggtcacgcctgaaagtgtcatttacagctttggaaccgttcttctagacctcctcagtggcaagcacatccctcccagtcatgtaactgccttctatccttaacctgcccctctcttctgattccacatatcactaaaagctgtaaatacctctatgtttttaatcaagccattttaatcttaacatgcaattctcactttcagtgtttttccatcttgactattattgtgttaataagtgcttgttatgacactatttattttgtcgcattgaagttgtgactgtacctcaaatgatattacgttattgttcaataaatgaaacatgatcttatacgaatgacaacttaaggtatggaaacctttctctttgattaaatacttaaatacttaataatggaagttgatgatgctatgatagttatttatttaaatttaacgtcaattcattttccatatgctcacgtgttcaattagttttcttcttggttggtgccatatggagttatctgattgtgtttgcaggcacttgatatgatacaggggaaaaacaatatgctcttaatggattcacatttagaggggaagttttcaacagaagaggcaacggtagttgttaatcttgcctctaaatgtttgcaatatgaaccaagggagcggcctgatacaaaggatttggtcacaacacttgccccgttgcatacaaaacccgaagtacagaccccttctctaacttaataatggaacatatgatttactggaactttgttgtttcaacagccctatcaaatattccattatcacctacacaaaaatttatgttggatgttaatgtctaatattaaaattctatgactttttatatttcatatttgtttctttggtcactcatttcaaaattgaatctacatggttggggtcgcttagctcaccatcctcaacttacataaaacatggtaattcaaatattaggctggaacattttaaattgtctttggagaaaatttagttgaacctgggttatttgcaaaagttcattttgactctagggtttctttagtccgtaaacttttccacttgcttgagatgatataatattataagggttttctgtataagtaaggttaaaagatgtttgatatgtcaagttctcaaacagccaaagtaattggtttatggttctagctgacttgtgaattctagttagcaaagaattagtcatctttgctggtttggtccttgtttcagagttacattaataaacttcattcaccccaaaataaatcttgtgtgtactactgttagtttattacttgtaaaggatagaagaaattttagtaattttcatgatgtgatattgtctagaaatataggcatatgaccttcaaggaatctgttctttgtgtacatctatctcaaagagcttagtcaagacttattttattttatttttaaaatctatagccagttcttagaatttgagcttagggcataattcagcccccacaaaattggtattaaagtggcttctaagttgaggattgccaaagccttcgaaagactacattggtcatatatttagttgatgtgagatcttaacacaccttcatgcctaggaatagacatctagagcatagacaaatactggtgacccaataacggatgtaggattgaccttgataccatattagaatttagatttatggtctaactcaaccccataaaatcagcttgtaaagtgaggactgccttttgaagttctagttaagtcgcatctctaaggcaggtcaaaaaggccacattaataggagtgacagcaattaaggtgactttccagcacaccctctcacacctaaggttatgggcctagatgttgcaattgggtggcccaacaatgaattttggataggctttgctaccatcttggaatttgggcttagagcccgactctaccctataaaattagcttgaaaaaaccaaattgatgttagattttaacaccttttgcctcacaacccaataacaataccctctcatgcctaggaataaccatctagagcatagacaaatacgggtggctcaataaaggatctaggataagctttgatatcacattaaaatttgggttaggcttagagtgtaactcaatcccacaaattgacttataaggtgcggattgctcaagctttatatgctctatttaagtcgtatctctaggtgatgttgggctaaacacactccattgaggctgtagtttagccaactccccaggaggttgcaattaagaaggctttcttaacccccaccccccccccccccccttcttctctctcaaggctatataggctcggaacatggtaatgtgggaggcccaaccacgaatctaggatagatttttgggatcattgaatttgggcttagggtctatctcaattccacaaagctgactttaaaaattcaatttgtaaggtgacgattgtccatgccttataagaactacattggttatatctcaagtcaatgtgggatcttaatgcgcccatgacccagtaacagcccttcatgcctaggaataggcatctagaatgtagacaaatacgaatgacccaataatggatttaggtttagctctaataccatcttaaaatttaggcttagggcctaactcaaccccacaaaaatggcctgtaaagtgagattgctcaagctttataagctttatttaagcttataaagagcatagtcaagactttttatctatagctagttcttaggatttagggtctaacttaaccccacaaaaccggcttttaaaaaaccagcttctaagttgaggattgtccaagccttataaggataacattggccgtatttctagttgatgtgagatcttagaatttaagcttaggaactaactcaacctacaaaattgactttaaaaaaccatcttgtaagttgacgactgttcaggccttgtaaggactacattaaccttatctccagtcaatgtgaaatcttaacacactccttgcgcccatgatccaatgacaacaccgcctcacccctgggaatagaaatctagaacatagacaaacaaaaatggcctaataaatgatctaggacatgttttaagatcatcttaaaatttaggattagggtctaactcaaccccacaaaaccaacttgtaaggtgaggattgttgatgccatataagctctattaatccatatctctaggtaatgttggaccaaacacaccccttgagactgcaattaaccaaaaatgaatttaagataagctttgacaccatcttagaatttgggcttaaggtttaactcaattctacaaaattgacttttaaaaaccagcttgtaagattttcaaaaaaagaagaaaacatcttgtaaggtgaggactgcccaagcttaagagtactacattggctattctctagttgatgtaggatcttaactctcccctcacacgcatgtcccaataacaacatctcttcatgcctaagaacatacatctagaccatagagaaacatgggtggcctaataacgaatctttgatggactttaatgtcattttagaatttaggctcaaggcctaactcaactccacaaaactggtgtgaattgcttaagctttataagtcacttctctaggtgatgtgaaactaaacacacctcctccaggttgctattaaggcaacccccaaatcctcatgctcatggtggcctaaagcatgacaaggcaggtggctcaacaatgaatcaaggataaattattaacatcttagaataagaacactccctcacgaccagggataacatctagagcatagagaaatatgggtggcccaataacaaatctaggttagactttgatacttgattagaatttgggtctaggtcaaccccacaaaatcgccttgtaaggtgagtattgctcaaactttataactctatttagaagctatatttctaggtgatgtgggactaaacacaccctttcacatctacaattaaggagactctgaagaggctgcaattaaggcaagctaagggtaattgcaattaaggcggttttccaacaataaacaaattttaattcatatttttcaagcattttaaatgtaggacaatctagtacacaaggctccaacctaatggagtttagggagggtagatgtatcaggctgccttacccctgtgagtggagagaggttatttcttggatttgaatgtgacttcaaagtaagacaacaatgttatagttgttcaaggctcgccctctatgtaagcattttaatttgtgaatataaaactatttatgtagactcttaattgtattgcatttatgcattatataaagacattcagttggataaggataacccaattgttagactcgcatgatttcaaattttgagcttttggtcatacacctggttgaatgactttagggctgagcccggtgttacttttaagtttgcatttacttgcagtttgaaaaatcttaaactatatgatatgattttcatgcatgtacattgaaggttttgaactttatatagccatcggataaaatttagttatctatctataaattttaactttgcattcatgcatatcttacaagaatcttttaagcagtatgataaaaatagggcacaagccaaactagttctatctttgcaaggctgaacgtgactaaagaaagttcttccatgctttttgtatacttttttcaatttgtcatgcatgcaagtatttttattgtcttccttgtcttatcatgtatttctcagtgtagaaaactagagaagggattaaagatatatattgagctatagcaattccaacatcttctgtcacttgatatggaaattatccttgttaaatggcaatttagacatataaatgggattaaagcagaaacaattctagttgactattattatgtgcttcaggttcgttctcatatcatgcttggaattccaaagcatgaggaagctccatcaaccccacaacgtcctctttcagcaatgggtgaggcttgttcaagaatggacctaactgcaatacatcagatcttggttgcgacacactacagggacgatgaaggaactaatgaggtaactgatgggtgcattggttttaaattttctatttttaattggatgatgtgccataaggtttgaatttggattggttcagttgtcgtttcaagagtggactcaacagatgagagatatgctggaagcaaggaagcgtggagactatgcattccgtgacaaggactttaggacagccattgataactattcccaggtgcaattctgcacttgtttgacattgtaaattattgtagctgtgctatgtgcacgctaattattttgagatgcttctgcattgttattcatgcagtttattgatgttggaacgatggtctccccaactgtgtttgcaaggcgcagtctatgctatctgttatgtgatcaaccagatcctgcactacgagatgcaatgcaagcacagtgcgtttatcctgactggcccacggctttctacatgcaatcagttgctcttgcaaaactggacatgcacaaggatgcggctgatatgttaaatgaggcagctgcattggaagagaagaggcaaagaggagcaagaggatcatagttttatgcagtgggctaatttgagggtgtcaagttctgtataaaggttgagctgggaagcaaaactaacgtttgaatgagtttaaaatgtgtcagagaaatacaaaaagtggtggagtagatggcacatgcatttttatttcaccatcttataggaatcggttacaacttgaaaactgtgcttgtgcactctaaattgggaaggaataccggtaatttttccattgttaatgaaattgattggttgatgcctactgggttacttactgtcaaacaggtgtttattgaggttattctaactcttcactggtcaaggccatggtgttcatgacattatgtgatgcctgcataattcggtttatttttcaatgattggtaaaatcctgaatacaaagtaccggcccatgcccatcggccatagcagtaggcagcatgcacgatttttaatccagcgctctattttgatctttagagatatttaaaatacttttgtccagtttatagaaatgtaaattataaatttttgtttctctcattacctttggggtttggtttgatattcccttggatccttttagtttaggacagcttccgttactttagcctatatcataccaaaagctactcctactttcaaagttactcgtgcttcgtctagcgtctattgtacaaagataacataaacgttagaaaattttatgggtttgaaatagtagtataagttgagaattttagatgctgtcttaattaacttagtatatcctttatcataaacacttagaccccattttctaatattccataaaggtaaaccagttcaaagggaaaatgttttaccattaactaacatagaattgttctagattaatcaatggtattaaattcacattttgaatatttaattgtgttaaatatttagagttagaagtgaaattttgttgttcataattctatttaggtcgagtaagattatctttcatattaaataacttatctatacaggaaaaaaactgttttaatggtttcagattatatcgattgattttgccatgtaggtttttaaacaaatgtcaattctcattacttttcctaaagtgggtacatgccaacaaggatataacctcatctaagttccgagtgtttacagattggttgattcagttttaaggaagagaaaaatgaactaatcaaaataaattagattaggcggagagagggaaaccaagttcatcaagaaggaattggtttgttttttggttgatgaatttggtttccattctttttttttggttgatgaagttgctccaaaccaatagactcaacgtaaatattaatgttttttattagaattttttggtacattgatttttgggtacattatttacttttgatttaatgcgacgtcattgtagtatcatcaaataatgtatcttaaattttatatctatattgttcaaaaaaaattactttcttatttctaaaataagtgtcattttaggtttttttttttttgtaaatcaagaaaaattaataaataaatgaaagataatagtaattttacaaaattaaccttaatgttaatattgcattgcaaaactaaagtgatatttattaggattatcaataaaaaaataattaatatcatattgaaaagataaatgcaacacttattttgatttttttcttttcaaatacgatatttattttggaacggaagacttatatgcacattacttgaggattttaaacttaaaacaattaaacaaaacacttacattctagatcaacaattggtaaaattaattgttcaaataatttataaatataaaatgataataacaaacatgtttatatgatatttttatacaaagtttaattttaatttattgatcaaatatattttaggataattataattttattttttaattgattttaaagttttgcaatttttatttatagattaattattctaattatatttttttagttttaattattatacataatttcattatgcattttattattaatcttagattttatcttaaaatgttccaaaccaagtataaaataaaataaaataacatactcttaagtagatgtcatattttcattatgttaattagtggactagttaaaatatttcgaaatatagtgttaaaatcatacaataaatcatgtaattagtttaatggttttttttagtaatggtttaaataaatagtataagagaaaccaaaaactaataaaattatgtcttacctaaaaaaagataataaagaaatttaataaatattttatggataaaaatataaataaaatataaaaattagaagttagtattttaaaaaacgttatttgaagtaaagtataaaaaatgttataaactattaaaataagtttgtttataaaacattgttaataaatttagacaaaattttcaaataattaaaaaaaaaggttaaaaatttactaaaagtatttggcaaaacatacacaaagttaacaactatttactcgattacttctccttctatgatgaccaaaataccaaattaatcaatttatattcactctccactttatcattaacattgttatacaaagtaaaccattcttaagaaagggatgatagaccaaatagagacatttttaaaaacttttttactatatattaaaaaaggctcttccaaaacatattataaaataatttggggtttttttaaggcatgttagaacaaaattaccaagttaattagcaatttttgagccacgtattattattttgtatatataaaaaaaaaaaaaagacttgcacttaacatgcatgctaaatattgttgaaccaaaagggcgtaaagtgagagagtatgccaaagtgctctattagggttggggtggagacttcaaaagaggaggcggagagcagggatgtgacgtggcaggagccatagaaggagtgcctccgcagtccgcagccacagtctaattaaggaggacccacgcaattaagtgtgtgttagcctctgttaggggtgttcgtggtctggattggatcggttttgaagcaaaaaatcatccgatccaatcccttcggtttggtcatttaatcatccattcggtttaaattttttttcaaatccgatccaatccacaccatttctaattttcattggacaaacatgttcattggacaaaataaggagcaatatattgaatttttgatttttgggctatgatgaggaataggcccaagtaggtaaagggtaaggtatagtttataattggatcggtttggattggatcggtttccactagtcaatccgaaaaccgatccaatccggtgaaaattttcggttttttttggttttcggtttttcggttttcggttatttcggttatcggtttttcggttcggtcatcgcggtttgcatcggtttggatcggttgatgaacacccttagcctctgttaagcgcacacagagtcatctcattttagaatatttcaccctaaaattttagatgcatgtgtttacgataaattcgtaaataaatagattacacttcaatataaagaaaagttatttcaagatagagagtcttacctttaagaggctttgaatttctaatccgatagagaatccaacccaacttaacttctataaatactagcaattaatgttaatgtatcaggaaaagtggtaattgaatacatttaatatatatcattaccttggtaaaattcatactaactcgagtatcattgtgtcaaagtgttctttgtacaagtatatattcacccatttttaatggtttagtctcatcagagcatcaggcaaactaaacagattttggatattaattgatcagcggaggagtgactagtccataatcaacagtccaccttggacatattagcatgtcagacacaaaaaatgttgacatcagatgaatcagatctatgaaaagtaggggaagatgaagtagtaaaaggaatatgtgcacaatttaatttccctcaccaatgtcaagacttgaatgcaactagggtttgaccacaaaatttcttcatgatacaatgaaaacacttgagttttttttgccttttcaaaactcaaggcagataataatgatgtttacaaaatgataattttgttttcatttttttttttgaattataatttttttattggatatatatatataaaaggttaacttagtgataaaagatgtagagaggaacaaatagattgtggattcgattcctctcgataataaaaactaacaattaaaaattaatattttactgataatatatatatatatatatatataatacaaaaatatgataaaaaagaaaattctaattaaaaacaaaataatttgattttattaaagaacaaaatatttgttatgctgattattttttaagtattttttttttttttgacaaaattgcctgaaactcatgttttcttaaattcaattgtgaatattattatgctagtaatacctatactatttttggtgtaagttttctatgagattaaccaaaggtaagacaaatgaattttagtacaattggaacatgaaagaatcatacaattgctatatatattttgggattaaaagttgaattgaaccttttatgaaaattatatatttttcaagtggcgtctttttgaaagaaaagtgacacctctcaaatgaaatgatgtatattttaaaaaaattataatttttgaagtaattttcatttaatgaaaaatcacatcttttttacttgatatcgtatatgaaaactcacttttatttttaaattattctttacgaatagatttgtattttcaatgaaacaatacaatcttcaatatgaaataattcagttttcatgaagaaacacaacacttcatattttgaaaatttatgacaactcataaatttgacactcataaaaaggttgagtttaattaataggtatttttttaatgttaaaattttctttttattgttaatcaatcaaaaataattattagtatataatatatatgatgattcatgattagatgatagtattaaatccctttacatacatatccatcaaatatgaagattaaaaaggtgcatgtactttagaaaatgagatatttttttagaagaaaatgaaatgttaattatttataataattaattataattaaacagttgagattataataaaaatatttaaaaaattcttctttctttatttctttttttttcttattacattatttatcatttgtttatctccttttttttttttaccaatatctctcctttctattactcaaattttcacaataaaatgggatagacgaagagattcatacatttttttgaacttgaactgtgaagtaaaataaattaatgagtagcgttatatctttttactgattttcctacaatttctcctattatttaataaagaaaccactaaataaaaagtaaagtattttatatctaataaaataaaataaacttaatacttatcataaataaaacagtaaaataatgctatgatatagtataaaattattcgaaattaaaataaagctcgttgcaaaaggactaagaaagagctgttctagcaagaaaaggacatgcaccttcaaattcatcgcgtcaactccgtaactccatatactgacggaggaaacatgtctaattaactttaatcatacaattattaatttatatttaatcatttagtttagttatacgattataaataatttagtgatgagaatgagatgataaacagggtggctctgctccagcacctggctgcagagggaggtgacgtggcctgcttggtggtttgacttattggcacattcatgtcatataacaaatacatatattataaccgcttcattaaagtcttcagcatttgcaaatccatattatgcatgttataccaaaactacaaatatactcattcgtgtattgggctggagtttaatgaattagaaatacataataaccaacaattaacaaagctgtcttcacagatcagcccttcttcattcaagaaatgcaccataccacctgcagacagtattctatataagatttttgataaatttctttaaaaatacttctaaaaaaaaaattagatgaatttttcataaataaaaataagttttccattagctaacttttagaaactcatcaatatagtttctctaaaagatgagatgacatatacaaattaattaatggaaaactcattttaccttatggaaaagttcattttattttttttcttcttattttctttttctagaaatacttctagataagtttacacccaaacaggtccatactcgagcagatctagacgaatgaggatttaattaattcatatttttgtcattttgagttacaagggagatgtggctttgagaccttttcttccttctcccctggaggaaattttgaattgatttctttatggaaaggcctggcgagacatgtatcaatagtgcttcagaatgcaagccggtagtgctttcctccatttcttgacttgctaaccatattatcattcttgcctgcatatatatatttttatagtattaaatcatgagtttaatggtgatgtaagaccatctaatcacaaaaaattaccatcgttgatataatcttttagataattttataaaattcaacaaacttatcatatatgattaattataattagatgattgtattttacactatcaatgcataatctgttttctattagttatttagttttataagcgttaatttaatttgacacatctaattatttccttccatcaaaattgtgtaattattttatcttattaatttcttttaaattcacaagcttgcttctcccattttgtgagctaaatgctgatttccagttttggagaaaaagataaggcataatcccttcttttatttcatctatttaatgtttcaagaaattctttcataccttcaaaattgacgtattattttctctctctaaatttaccggtatcaataaggggaaataaagtatttcaagaaaggacaactcagttaaataaacttattttttaattaggacaatttaataaaaaataaaaaataattttaaattcttaactaatgttcaagggatacaagattacaattaaaaacagttatatttttttaccaagaaaaaggcattatatctattaatccttatttcagttttatgaattgcttaattaaaaaatttacattcattaactaattcatccgttacttttttagtaataaattatagaagatatattattttaattatttcaataaaaacaatatagtggaataaacatttttttatacttataatcgaatttatataatttgattagatcttataaaataaccttttaaaagataaataaaattgcatgaagagaataatgatgcaaaattttattatgctatcaagtacagtcttgtttggtaacgcttaaaattgaataaataattacttagtttttaataagaataataagaataagcaattattcatttaaaataagttaaaggaaacattcaccgagtctgcagttcttggaatgcaataaaaaaaaaaatggtttaaaaaggagttaaaatggaaagatagaagattggaagatactataacgtatacctgaagttctgctgtgtcaaaaatgcattggcgtcgtccattatgaagaatagctacaagtttattgtggatgttcaacgtcccattcctgcaaaaatcttgcagaaaaggagggagaattagcaaataacgtaagaagaattccacttgcttaattcctgagatatacaaatgaagggagtcataacgtaaatattgaaaagaaagagtccagattgcttgcattgaacgatgggaaggtgatgaagacggaagacgaagatccaaatagcagtttctcttcatgtattaatttgaaaaatgaaaaatggaactattttgtaatgggtaacaaaagatatggcaattaatttgaaaatattggagaactcaattaaaaaacacagggagttgattacgggaagggtgttatatacaaacatagatgaaaaaatatgtttggggatgtgggaaatgagttacacatgcccaaaactattcattatggttatagcaagctatagctcttatcagttgcgtacccgcggcattcaatgcaattactaactcaatctgtatttcatgtgccttcttaagttgacagctatcattgtttgctcttctaaagtacaaaattacccaaattggatatttggtcacttggtcgactttagttggttttactttctctgtgtaaccactcttattgcattatgcatctcttatactacgtgctctctctaatttctttcacgtgatagaattcatttcaaaaagacatgaatttatatatatataacaccctttcattcagctgcctatctatctctctgttggtcattttccactagtaacttctatgtactatttcatatcagcacggattattataagctattcgatgaggaccttaattaaatatgttaaatattatttcaattatttcgggcatatatttaataattccatcaacactaatagggtccttaattagtttttccgcacaaaacttccaattatttgttgaaaaattgactattgcatcagcaagatgaaaattgaccagcaaattgactgtgatcgtctttcaactaacttctgaactgattttttcaaaattagccttcaacataaaattaaaaaaaaaaaaaaaaaaaaaaaaaaggcaatctgagagttataatatttatatttcttttttctacaatatcttttacaactcttttcctccaaattctttttatcacattatctatctcacgtttctcgtataataagaaaagttgtataaatttgaactagaaacctaatttcttaaaatctaaccggatcaaagagtactacacacttagattgttctcatgtgtcacatgccacgtgtgagatgtttttatttttaattttttaattttaagaagacgtgtgtggttgttctacccagaaagagcaagatatatctaagaaatcatgcgcttcagttcataggcctaatatgccaagattgttttgagccaatgggacataagaatatgtagcaaaatgaattttaaccaattgacgactgtaaagtgatttattttgaaaagaatgttgacattttcatgtaattatgtaaaaaaacaagtagaaaagggtaaatagtaataaaaaaatgaatggtaaaaaataaaatgaaaaaatgaagaaggaagagtaaagagtaaaagatgaggaccaaacacccaatccctctgagatggacgcggatactacattatccagtgcaaatttttttttcgcaagttccataagtgattaaaaagagcatcaatcacatacaactgtgcaaaggcacaggcacaggcacatccgtacatgcagaatgcattcaccccaagtgtaatcctttatcgatgataaattcctaactaacactcactggtggaaatggtgttcacaccttttcatacttacctccaattccaaacctggttggcctacttcataatcttcaaagcaagcacatggtttaagcattttgtcttttcagttaaagccacttcctagaggccgacccctgattctgaactaatctttttttgacagagattctgaactaatcttaagaggccaacatcacaacttattgatcaaaagaggcaacatatgtttatacctctgatgagctcaccctgctatgctgaactgttttccctccctcttgcttaataagaggaccagtacattcaaaaacgggatttttttctttctaatgtcatcaagcattagatcatagtctgtgctttaatttggacttcactcgtgttttcttgcattgcaatttaaaagagcattatcctacttctataaaataaatttaaatcttcacatatgttccaaaaaaacaatttaattctacacaaaataacttttataccattattctttttcagttaatcatgtgtttccttcaattaatgacacgtcttttaagttttttcataatatatgttaaattattattgttcttaaagtaattatgtaattaaaacgtttttttttttattttctttaataatactcactctccataccaacttctcacttacagaatatttttggcccataaatgagtttgatcgaagctggctaggtcggttttatactagtgtttaaagttggctatgttctttgagtataggttttgattatcatttcctgtttgtttgatgtctgcagctgtcttctttttgtatgatccgtcacctatcacttccacaatcaaagaagagcaaggcacttttcttcatttcattactcgactttgtgcagttctaggtgaaacctttgccctaacaagattttgtcttcaccaattatccaccattttgccatatcaaaagtgaattgtcctctgaaaggttgagatgtggttattttctttgtaagaaatggttaagttggaactgcaacatattttttgtgcttgtaattagataattcaactgcagtttggcactttgaataagaattaaagatattgcgactaaatttccctaaattggtttttccattgtccttattctaaaagtgaactacggtatatatatttccggcaactcccctgcatctgtaagatttagaagctaagaaggactccctccattaaaaggatggtggcatagatgaaaattattcttttcatctcttccacagatttgtgtttgtataattccatgtattgcgggacattaatggctagcagttcataatctcctttgcttttggaaagggtatttaggggctctccttcgcattacattgcatggttttgtcatagctacgtgcatgtggaatcaatttctcatagttttgcccttccatttcccaattttataaatttaaaccgcaactggctaactgaaattcatgcactctatctaggacaccttaaactgtaacaacttttcctttttattcatgcactctaacaaatcgccggtagtaacttgagggtgttttcattaatggggttgaattagtcgatgggattgcttgtcagtgaaaggaaagagcataacatacaaaagtaacgtttaactatgttaacaaatatcatgattcacaccttcaagtggaaatcctcatgtttttagtgtaaaaagttagtaaaaaaagaaagaaaaggaacaagtcttcataaccgaggaagactgccctgaatcagtcgcatcaactgttgccatgctgcggcagatgattctcttgttgtctttgtcgctgatgatgtcctccatcttcctgtacctgttcttgtacatgctcacgatgctgctgctctgtccagttaacattttcaaaggaggattgaacctgcctgctagttctccatccgatgaattccataacgagagaattcatactgatggcaatcccaaatccagtgaacgaggaaaggagaatggagagaattgcattaaaattgagctacaaaattgaaaaaaaggtaaatgtcaaaatatatatttttgctctcaccgagtgccaagtatcttcatgaagtcaggataggaactatatcatcttacaatagtataaaatacatgagctaacaggataagagttgcaaactggaagcaagcataagcccatacgaaactcctgctcactgccaccacaacaacatcactcatgttaatcagaaactaataatccagtatcatgtagtctacagcataggattatagcaactccagaggatctaatgaacaggtaaattacagagtatgggccttgttctaatcaattctcgtgtcagaatcattaggataatgtcaacttcttttaccatttatttgttttaaatcagacattacacaccaaatcagatgttgcggctgatagaaattgtttctttgaactcactaaacttaaaatgaacaggaaaattacagagtatgggtcttgttctcatgaattctcatgtcagaaacaataggacaatgtcaacttgtttcaccactttattcgttttaaatcagatattacacaccaaatcagatgttgcagctgatagaaattgttcctttgaactcagcagacttaaccgtatactccatttgccaaaacccaaacaaactttgtttcttttaactcacctgacttaactgtatcccccaatttgccaaaacccacacataatctggttcgaaatcaaagtccaagatttacatttaattacacatatcaagatccagtacaggggtaacaaccatgcattaactaaagagaactttgaactgtagccatccacccacagtaggacaacaacatcaatgcttttttccacaggactttacagaagaaaactcagggaggagggaggaggaagaggaggatatggatcagcaccatttagagctagaacctttataaagttttcttaggtctccatccactccttttaattggactaccttccatttgatatttttgtcactaaggctcctactgctctttaaattaaaattatttaacaatgttggcttctcccttagcttaaaaactattattatagaaccctggcccgttataaaagcaaatggaagtcaaaacgtcagatgttaaagggaaagcttctgtgttctggatcctcccagtttgttaaagcttacaaaaatgattctgcagtataagtttttggggggcatttttcataagctgctattttcaacctatgaaaaaagcagtaaaacagttttttaaaaacaaaacatacatataaaaatcttttacttaaaatatagtttatattcaaaaaaagaaaatgaaaaactcatataaacaagcaagaaatacttgaaaaatgcttattctcccatttttttgggggtacaggaatgcttattcttccttgataaactagagttagacgcttagtaattacagtcgtaatgagggtaattctaaatagagaaatgaggtgtacagaccttgtaacttatctcaattcttttggtggtaggaaaagcgcacataaggaatgacatttgcaggtctagtgaggagagacattaaaaaataattccaggccaatggaggccaaaacatttgatttagattttataagaacttacttattagtccaatatttgtcaattacaatgcattgttacttgttagtccaatatttgtcaatttccattgcatgtattccattttaatacttcatgattatttttaccgttatccttatctgtaaccatagcttgcaagtgcataataacctacttgatgaattccagcaacacactttccaatacactttgtaccacgtattaaaattcacgcgagtcttagtaaataaaaaatgggactcattaaataggagatgaagcctacatgaatatcatccaatagaaggaagtgtcttcaaaagagtataaagagcatattgctaacatctctctaacttaccataaatttgacaattatacatgaatatagttcacttttatacctcataataaaaaataaaaaaaatccagaataaaaatgaaatcaaaagtgcaaatgttaagaaagagagaagaaaacagcttacccatggttgatgcaatcatagatgaaaggagacctaaaacacaggagaatggtaatgaaatggcaagagcacgaggtcccaaatctgaaacctggtaaactagaaaccattgtgtcagacacacttatatttcatacaaaacagtagttataaagttggcttggtggttaaagggagaaggggggagggagaggttgtgggttcaaatccctcccactaacaaaaactaacaaactaacaactaacagttaattgttaacaaaggaaaacaaaactagaaaaaataaatgaagcatatacagcattatccaagggctctcatataaacagtattagtaaacatggccttctagtactaaataggcaaagaaatagtatctccctttattccccagaacacaggtacaaaaatgtattccatgaataaattaatgagtaaattgaacaaaataataaaatacaaagaaagccatttgtttaaatttggacctacaaactgcctaaattataaagcacttttcccactccttcagcactaattttaaacttaaaacaagtgatcttttgcctttttaagatacagataggatttgcttcttacaaaaaacagaaaactatttttatttttttaagaaaaagcaatttagagaaacacaaaaaaagcatacgactgcttattttattaaaaaaatattttttttaaaataacttttaacaaatgggccctaagtatgtgttccctgttcttatgccctaaataaaataaaataaaatccttcatctgtaaactgagaaaatcgctatactcccagtagatgaggttatattttcagaattacatactaacaactacagattggtcaaaataatctttcagaggcaagtttctcatgtagatggcactgtaacaattggatgcaataagcccaaaatcataacttgatgtaagcagcagttagccagttaccataaacttcagcacagatacaaagaaaaacataccagtagttgctctagaaaacaaaagtacgcaagcatgctgaccaagataagtactggtacatcctgccagatcctgttatgcatgaaatagatagaatacattacaattagaaaagtagtgattggctgatgatttatcataggttttgtagacataagaagggtgatgtttatgtctttttaggaggggtatcttaggtagatatacaaagagattgtaatgtgttacattacatgtatcatgttcttagtttttctctttattccctttcatttttggtttagtttttcaggatttatttattatcctctaggttttgacatgtctttttttattaaatgattctttgtttatccaaaaaaaaaaaagcagatgtatatgttgttcaaaatcagaatcaactgcatgtctattagacagcccatcagccaatagcttatggagtaggcttttcagtgtgtttgatgggccttggattttcccccataaccaggaacagtttcttgagattaattcaaaaaatttggcaggagcagagggtaaagttttacaggtgtcttgtacactgtcatttgggtcttaggatggagaagagatgcttggttattcaaggtaaatatcattcaacttgatgtagaacattattgttctgatggcatcttattggagttcagcacatcgattcttccaagggggttgcttagacggatataaaaagggattggatagctctcttattttctttggtaaagtgaaagaaggaaatctattctttgtaatcttttccttatattctttcttttccttaaaaggaacaaaaaggatgccaaacaataccaagaggcaagagcacatcttactgccacagtgccacctacccatatgtgcaaataaactgaaactgaagctttttaaacttaacaacccaaaatagttaagatctactactttatatagttttataaccagcctggttgccctaatatcatatcatagataacactttaagtctcctctatgtcagtttaagtgttaattgaacacagatgactaacacagtgaagtaattaaacatacctgtaataaactatttctgactgttgtggcacatttgatgcctgcctagcaagagtttgaggattataaattttcaacagtgttactgggaggttctggacatcctgcttgcagacatcacaggtcctgtttcccttaatactaaaccactttactgcacattcttggtgagcaagtgcaagatcacctttacaactgcattccatcttaagtgtattccctccttccccaagctccaccaaacaaatcctgcaaactgcttgttcctctggaatatcctcagtagcatcttcaatggctggaaaggaaagaacagagtgaaaagacacaaaggagggggaggaggagggatttaagcattcggttaacaagataatacaagccaatgagaacagtatactgattaaaaaatttatgtattctatgaaaaattctagtccctatttaacctgtttctatttaaataccaagtaatcctaactcagaaaaagacaaaccataaactaaaaccctaagatcaaaattgagaatcaaaattagaagttaacatcaatataaacttcattcagtattatcatttctttatttaatttggagagtccactgcaatgaaatgaaagggttttctttagattatctctaggaaacctctattctctttcttctatattattgttgctaatttcatttaatttatggtttagtgctcaactcaataataaatacatgttgcttgtcaaaatgacagaacatttcaaattatgcacattgttgatcaagttcaagaagtttaaaagggacatttagaagaaaattttgtaaattccatatattgaggaattaccaatctctggaaggaaagcaccatcagttaactttccaccaacagtttcaagatgtcgttttgccgaaattacacgaatcaagcccctagaatctgtaacccttaaattagtggctctgccattaactgggactgaaaatgatcgtgtcatatgctgatgaacttccattgtctgttcaaaaagaaaaggcatatattaagcaacatgtgccatttttcacttacaaaatgtgaataataagtacagtgtaaaagtagttgttttggtcttgaaactagaatgaacactggaaacatacacttaaatcagaatcacgtcctagatgtcttccatgtccattctctacacctgaagttgcaaatggagtaactggtaatgaatgtgaaacttttgttaatggggagataaccctattattaagagacagaggagttgaagtggaaggtttgtccaaaggagcatctgatgggggagtgttaggaactatgagacctgtcctttcaatatcctgggaacaggtatttatcttgaagctcctatgaggaagtaaacctctcattgaagacctgactttggctgaatttggccttggggggagtcctcttgtggaaccaggacttgatcgtgaaaccaaaggaccatcagtctttgcaaaagtagataatgcaatatctagggaccatgctggtatttgcagtgaggataaattaggtcgtctggactgaggaatctgggagtccttgttactcttttcatttccagtacatgtctacaatgccatgccatcaaagtaaaaaattcagagctggacatgtttgtattccttttatgatggcatggtgtgataactaataattactttagtctatccagttaatctaaatactaaaacattagtaatctaattctaatcaattggttaaaaaatacagattattggcactgccacacccagacccccacaaaaaataaaaacaagatcttgaatgaaaagaaagcacagaattaatttagtagtcacattacgattattcagatcaaaacaaacccagggtttcatttctttaagaaaatatttagagtaacctggacaggaaccggcacaaaatcggcatcaagttgaagctcagcatcagcaccgtcacctctcttttccatccaaggaaacgctttggcaaaactgttacagtcacggcatcaaatgcccaaacgccataatgtgttatattatatttttatttttatttaattatgattagcattataataatagaagggaaagaggggtgacaatgatgatactgatccgaacaaaggttagggttcctttgattcagataattaattttttaattaaccaaaatcgaaagattattcgcttttttggaatagttatctcacgattattacccgccaactgcaactcgtgacatgccaactttatgatccttccacttctcccacgattctccattctacgtttttcctctttccttcctctgcacctcgctcacacacacttttcttggagtcttcagcctctcaattttttgcaatttttttcctcttttttatattgtttcaaccataatttttttataaaaaaaaaaacataaataaaacgccagtttcctatattttttttattaaatgtaagggctggttttgacctactaaatgtgaaaaactctttttgaaaaataaaatatttatatatctttatattgtaatgtaataaatatttttaataaaaaatattgcttttaatttttaaatacttaaaattaaacggatattaacaaaattgtattttatgtaatttcaaaatattaaagttaagccacatgaaaacaccttcaatataggtcaattgttatttccatatcaaacttataaaagaggtaatgagtcactatagtggtatgacttttttatttaagattttaattaagattaatttaaaattatccttgagatctatgcttaacacaatacatacaatttgaaggatgttttttcggaaagatttgaaagtcattccgttggattcaaggttgatttgatgattgtaggaagaaaaaaaatgtttaaactcatatactaacaaaagaaaattgaaattgtaatttagcattttttataataataaaggttaacttatattttttatctactataatggttatttcttaaatctaatctcttgttttcttttaaattgtacaaaaatgggttaatttagataagttcacataagcatgtggctaataaggtgaattttcaggtacttaaaataattaaacttatttttaatttttactatattaacaaagttatttttacaagttatagaccattggtctacaagctcataaattgtgtggctaattaggttgttacaccttcaattatcgtttcatgtcccattgtattttaaaaagtacaacatgaaatgtaaaattatattccaaaatgcaatgggggacaagaagaaataattagaggtgcagaaagttttagccttagaagtagacaatagttaaatggatgacttgtgtttaagctgaaatgcagaattgtaggccttttcacccccatctggcgagttaaattttattttgaagaaaatggttaatcaattgaggtgattgaggaatataaatatataattgtaagaagagttaaagaatgaaggcaattaaaggaaggtggtaagcaggtggtagaataatgaagcataaagtgaaatattttgatgtttagcgtggaagggaagttgaggaaggtagaggggagtttcttgtatgtagaagttggattagaatttgaagtccagtccactgaattgaaggaagagcccaagtcagccacaaccacaaccacagaagaagtcgcagatacttgacagtgtgtgtgtgtgtgtgtcattcaatattcaatatttcatcccaaagactgcttcctggatgcatcctcaaagaaacacacatgactcatgactcgccaaacaatccacatacatccccccttccctcaatcacacctcattataacatcatcctactcttccctaattaaactccaacattctaaatgatatcaatattttcatttattagtatctcccgtaaatatttaaatgatacacacctatattatatctcatcgatctcatatataatcacactatctcagtaaaaagaagtcatttaatcataataatttgtgtaattaattattttcttaaaatatatgcggtgccgaaatttatttttctattaaatagataaagtttatatgtaaaacatataaaattaaaagttcagaatacaataacaacatttttttattcactacatgaatcacatgttattattgatttccattaaaaaccaaattacgaagaatattatttatgatgactttctatctccatgaagtccttttgatatactactaaaaccatccggtcttgtttcctgtaaactcaccaaaccatcttgaaaaattcagtgtctgcaaaagaaaaaaggttttttttttctttctattaattaaatattattgtctgacacatgaacacgtggtcagtaaatgaagggcgaggatattgcattgcgtttgtaactatgacttatgagttatgacaaggaccaaggtgagcacagtgaagaaggaaccataaataggccaccaatgcacatttttcttcccatgtcattctcattccctccatgagtgctaccatgtctggccctattcctaatgatcactggctccatttctatcaacaaaaccaattcccctcttccgtttccgacgccacaaccgtgacaaccaccgccgcgccggcccagctaagcccagaaggcggagtctcaaagcccattagacggcgttcccgggcctcaaggcgaactcccaccactctgctgaacacggacaccaccaatttccgggccatggtgcaacagttcactggagccccttctgcgcctgatctgtttgggcagccaatccctgtgaacccaaatggcctcatgttggccccttctcagtccctttatcagcaacaaaaccacttagcatacacagatggtggagacaacggtttttttcagagactgagcaacccaacagcaacagctccaaataatgatcgtgctgatgaggttttcgtggaccatggcggccgtttcttcccaacaacttcttcttgaatctttcttgtctgtccaataggaaggagcttttaagtttcttccgacagcgataaattaagcagatatttaggtgctaacttcttgaccaaccctatgtgaaatggaactatatttccagtgtagacagccacctgcacctgtaccacactttttcagctctatcttattttttggccttccttggttgaaatcgaatccagctatgttctttttttctttttctgaatttatgctgtgtcggcgttggcttaagcttttgtttgttttccttttctatttaaatttgtgtatttgttttctatgttaatcttaattgggaccttctctttagggagtcctagcccgattatagttcaattattttggatatggtaactcggtcaggcctgccactacctacaaattcttttacgtgtgttgacttgcttccttctttatatctctctctgtaacaacgttattcacacaataaattttataataatttattttttttatcaaattacttattttattccaaaaatatcaaatcacttatatgatcttttatcttatttttagtttaatttgatcatttgtttttttaaatataatttgattttttttagttcgctttagttaaaaattggttatttatcttaattttttgtttcaattttaaaccaactttttttgttaaaaatgaagtgaaggaaaaagggagaaaattgaaaaaaaaatcattttaaatgataaataaagttaatcttaaataaattaaagatcaaattgaaaagaaaaaaagataaaagatcaaactgaacaaaataataaaataaaaaatcaaattgaaccaaaaaataaaataaatgaataaataatttttttaaaagatagaagactaaaatgagctttgttaaaagataaatgaccaaattgaaataaataaataaaaaagataaatgatcaaataagtcatttaatcttaaaaatgattgttggacactaattaaattattagacacctataagaaagtgatacaaaaaatatatagatatgatatgataaaaagagaaatgatgagtgtcaataacatatattaaatgaattctttgataagagttgacaaaattgattttaaataaaattaattttgattaaaagtgattttgaagtgatatgattaatgtttaaatatttttattttaaatttaagttaaaagtaaaatttagtataattttttattcaatacaaaaattactcaaagttaattcaactcgatgcatatctgcttcaacattatgttgaacttgatccacgtaaacttatggacacaaatttagcatactactcaatcaagtttggattcaaaatcaattataaaaaaaattcaacatgaaaactaaacatgtgaaaaaatacctaaaatcaattatggactcaaaattaatttttaatgtaaaactaaacatgcactaaatgaaatactgtccaaataccattttctattttattatatacttttttattatctcttttgcatgaaagttaatataaatttgtattatatataaatagcattcattatctctctggcctttggtaacgaaaaatgtggaagcaggaagcagccctctctttataatagtaaaatctccatggtgtggaaaaaataaatttatttgaaattaagtagctgttaacaagtgtgtttggacctatttcatctttgagtttaggatgagtcaaacattatttttcagttgacgatgatgtttgatataagaggagtgttaacgacattttttttttgtaatttgttaaaatttattgaaaatcacttattttgataaattttacttcttaattaatgtttctctttcctaaatttattgaaaatttataattttcaataaaatctaaaaagagtgtcactatcttgaattgtgtttcaaattcaagtttaattggaagcaattgaaagtatttttttttttttttgtatgaacactatcttgaattgtgttattttaaacattacatgtcaaaatcaattttcaaatatacgcggaaaaaaatcatacgactgatcttacattaacttaaaatcaattttataaaatcacatgattcaaactaattctaaagacatatatccaattcatgtatgatgcctacaatatgcaaaagatataattgatgacttcaatgggacatgaaaattcacgttagattgtacgagtaagttgtgattttccttcccggagctagcaacgctgaaaaagaaagtagaacccgaaattaagtgaataaaaaggatatggtatttttcccatctaaaattaagcatatgcacaaacaacactttcttgtataccagcattcaacacgcaaaattttgaccacaccagcaaaatgaaagttcccttgtgcaacttcaaatccactatccaacataatgcatataatattacagatatcgcacggacagttgctattgacattctgccgagaacccaacaactccaccgaagtatacctattcttttttctcatctcttccattattttgaggattaagctcatcatcatcataatattcttcaaaatattcttcatcactatcatcctcctcatcataataatactcctcatcatcgtcgtccttatcatccttgccattttgtagacgaagtgtgccatctcttgactgctgacctcttaacctctcttgaattcgatccctaattgctgttccctgtttgtagatccaagtggtaacaataaataaaaaatgagaagttaacaagaagtttacatacattagaagagttgcatagctttttcacataaattagctcaccatcttgtggcaaccttcttcaaacatttccagaaaaccagctacccaacgatcagcattttccacccactcattccgatgcataccagcagtctttgcaacaatttggatctggataaaccacacaaagatatgtatctttaccataattgataattcaattaaaaacaaccgagataatttcaatgtatgatactgttatatattaagtattaagcgtacataaaagttgaaaagagaatacttatgtccacttattatgtaaaaagcataggttttaaaccatagcctcatctatactgctatatacaaagcaaaaaccgtagattagtttcatcactttcaatttaatacaacatctccctcacaccccgatatacattagcaaaatcaataatttaagaaagctgcttcctaataaataaataaataaaaaactacgtaccccaatatccgaaggctccaccctatgtgcaagtaagagggagggatattgtatgcagtcttacccttgcatatgcaaagaagttgtttccggattcgaccccataaccaacaagtcaccaagacacaacttttcttaaagacaaactcagaaagagagagagatgcaaaaatagtatcatttctctatttttcttttacaagacaactacaataaagccagtccatagtttttttcactctctagtatcttttccgtgtaggcaaagaattttaatgttggccaaatattaatatgagcctaataaagtcaaggaaaaaaattgaaacaagaaatatttggaatcagatgtatagctgacaatagagaattatgccaaagcaaactagtaactgactgatatcagtttcatggcaataaatcatacaaccactaattaccagtgaaactgtgatctgtgatgcccgacagtgaaggtttgacaaaaaaatggggagaaattaaaagcaatattttctcattcatccaggtttgtcacactaaaattacaatgataagttaaaactatattgaaaaaaatatatagatataaatttaagaaaaataagaaattcaatctgcaaagttctctctccccccccccctccacccacccacccacccacccttctctaattacacaatagtaatcaaacagcaagaagatccatgaagccaatacatttacttaaatataaaaatatacagaggatatgaaaacaaagacctatatatataatgaaatttagcacaatatgaggaatgcaattttcgagaaggtatattcaattgatttgataatgttaggactccatgattccgaattaaaacagactgcatggttcaaaataacaattaaaacaacatagccatatgtcaattcagattgggttggtttttttgttgattttactccttgataatgtttttgtccttgaaaaagactccgagatccacaaatgcaatacttagacaaaattgtgaagataaaccgttgaatccaaaaaccagtagcagatgcccaatgtcccataacagtttgaatgacaattgtacttaactatgaatttttcaaagcactttacctgacattcttagctcctacttcaacagtcgttacattacaaatttacaatctacatgtgattttcatcctacagccctttcatcccatttaattcacatgatgttgcctaacaaaagtattaattcgacttgattacctaaattatatgttatagcaatacataccttttcgccaactttttcttgatgttccttcactttctcttgtaatgttttcaaccttctattcaccctcagtcgcttttcctatttatgacaaagtaatgacaaccacaagggacaagagcattcaccaaaggaacaaagagtggcgtcaatataaggtcaaacaatttgctgaaagacgtatcatgttaaattttaaagtagaatacatcaaagagatctatgtcaaatcatgccttcacatagctcacgccaagctcgtttcttgagtacccacgatccaagttccgcagcacatattggttataatctttgacaattctcattataacatctgacgtggatattccttcggtccgttttgtttccttaaacctcccaacagatttaacctacatacaaaattcacggcacatagtataagtcagaggagaaagtaacaacgaaataaaaaaataaaaaaagttttgccatacatacaaattcataaacatcattggcagcaccactggcatcagcataactgtggacaacgggttgacaaggggaaaaaagatgattatattatgcaatgaagttactagattcagatgttgatgttgagagattaatcttacggaagagagtcatgagccacataatcaatgttgttcttgtcaagaaactcttgattgataacccaaggggcatcaggaataacttcatccacccatctgatctcaaaatgaaatcaaactcaaattcaaattcaaattcaaatggttgaagcaacaacaacaaacaaaatatcatacttgcagtggcgcagggattcgtatcgttcggcctctgtcataacagttttgcctttgtatttgtgggtgacttcatcgttgcaacacccaacaagcaagtatgtattcggaaacctaaaatcccaaagtaagagtgtctgtgaatggaaccttgaagaaatgacttctattaattaatggattgatataaatgaaatctattatcagatctcggaggcaaagcgaaggatcaaatatcatatgaggattaggaaatgattgatgcatacgatttcttggcttgctcaagggagcgagcgtggccaaagtggaagagatcgtagatgccatccgcgtacacccgaacgggacgctcctgctcctccggaggcgacgccgttttcgaatgctcgctctgatctgccattcgcctcttctattctcttctccttcgctccgcctctctttttttcttctctttggtaataaataaatcgcaatttcgctcgcaaacgtcctatgcgctttttcttcactgttttcctccgaaatgttctttttcttaaaacgaagacgaagaagagtactaaacgattgtttcagagtaaactatgtttttctcttataaaaaatgctttttcattttcatgattttgttccttcaactttttaaagacttcgttcttcaacaatttttattgatatcaaaataggccgaatctggtgagccataagtaagttatgttttctaaactcagcatatttttaatatattcagtatattttttatttacaattttatccttatacggattatcaatctgtataaatcatatggattgattatcaatataactcatacgaattggtaattcgtagtcatacagattgtcaattcgtaaacattcaacacaaacggatgagaaaaaactcaaggcagagaagacaaaaatcaatgaaagcaacgacgaatgacgaaatagcagacgaaccacgacgttgggtgcacgaacgaatggtgaaggtggagaagaaggagaacattgcgcaaacaaaaacagacaagaggagaagaagaaaaagctaaatggtgtatgtccatttttacaaagggtatttttgaaaattaactgtacaatgctaaatgtattgaaaatatgctgggtgtagaaagcataacccgcctagatgaaaaattaattttttttgcaatgtgatgaaattgtaattcggctcacttaacccatgatgtttagacaattgaatttgattttaagactttggtattgtaagatttttgaatgatatttaggaatttaagacatttgaattattacttgaatgataatattatatgtttgaatgattatttgagacatttgcctattatttgcattcgtatttgaaccatttgaattaataaatgtcgttgatgaaaaaattattttaaaaaaatgaaaaatgttataattttttatttagaatttactttttatttttataaatttggtgagtcaacctatctaatccattaattcatagtgaatcatgtcaagttgatattttcatgactcatttaaatatgagttaaattaattcggttatttaacactcaacttatgatagatcaatctatattcatcacacttatttgacacttctactttttttatttccaatgtttagatcattttcatttattccatagttaaatgatgatatgttatttatttttattataattcattttttggcaactcaaacgctaggataactttttaaagattataaacatattctatgggcaagaaattcttatatctcaaatccaaatccaacatttatacaatttcaaatccagattgaaagtttgaaacacaaaaataaaataaaaacaattcttcaccacttctaaactttttctccctatctttactcccaattcttcacaacttcacttctccctctcgtcctacccctctcctcctaccaccatcgtttttcttatttttttatttatttactagttaaagatgttaaaataaagaaaatcctaaaaatatttcaaaaatctagaacaaataagaaaaacacaaaattcacattttttttattcttcactcaagaagtgttctcatccgccactggtatcacgttggcgtatcccacatcatcaattacttttattattataaaaatgaagattttatagtaatttaattaccataattgaggatgagtttgtttaaattttaaaaataacaactttaaaattggtatttaaaaaaaaatctaaaacttaactaatttttttatctttatattaatattctaattattcgtatacttatcataattccttgataacaattaacttataattactgctatcatgatttaattatttataatttcaaattaaattgataataattaatctaaggttaatagctgcacaggtcttcttgtttgggaatgttttggttggcagtttctttctcaaaagttttttctgatgttattctatatgaatttggttttcaggattcattggtggagactgctcaagaggaaaccagttcattaagtaatataattgcgcaaaccactaagtgatgagatcctattatatagggtttgtttggattggtgttagttccatccaacaccaatcttttgatactgccatcccgttgaatgtgcatcggaatgtacgatttcagtaaaacaaacacactcatagttgttgccatttttttttgggcatgatgcttggtgtgattgatggacttttcctgttatatagtttatgtctaagccccatttttattgctgttacgttgaatgttcgattttttatctccttgattctttcttttttgttttttgtacaatagaaaagaaaaacataaactaagttttaacaggaaattttgatcttcttgatctgaattccattttctgaaggttggcaatttcaggtttgtgtacgcgtgaccgacctgtctattactggtaatctgtatgtttgaggaatacttttgctttgtactttgaaattgaaatcctgtgcttgtcaatttaatcttttgtttttgagttgttagtcttgaatgatgactgcataatatatgcatttggatcacagcgacaattcaaaaaatatatttttttaaatggaagtagcaattgttagtttttagattaatgtgatgtatattttttaaggtagagatctgtacagcgtcagtaagttaaatttagattataataatttttgttgtaaaataaaaaaatgtttaaggaatgttggtcaatttaggtgttggcgtagaaggggttcggctttgttacctagtgtaatttattatattgggtaatagtatttgtacatcataatatttgacattattttaataggtttttatggtaaatagttatttttgtttttaaaagtatgtgatgttaataaattagtattagtcagttcgcttatatggcatgtaaggatgaaagtgtcacgaaagaattatcacgtggacatagagactaatttgttagtaatgattttttttattgcttctccttttgattgttagacttgcaatgactatttttttccctctatcttatatattgttctccaagaatgaaggactgagcttcttgttcttcctctctaggtgtttttttttttttatctcaccttcattcatttaagttactgacaaatacgtcattaaattaaataatttattgacatttttgtctttctaagatatacaaaaacgacagcttcgtcttcagtggaggaagaatggtgctccttcacggtagtcatggaagtcgtcagaagtctcaaaaggcgagaaggggaaggtgaaaagagaaaatgtaacaaattaagggtaaatgaccttgtgttttgagtttgactcaagtagtaacacaagaaaaaattatattgacattttagtcctacgagtcatcgtctcaggttcaaccaatgaatgtcatgtgagcaattatttcgtgacatttttgtccttacgagctacgtaggtgaattctctaatgttaatggatgaaagttgacggtggaatgaatttttctcacttttacattttcaggaactaacttttgtatttttaacattcaggaataaatttgttagcgctaaacacttttaaagataaaaatgataatttatccatatttttatttcatggaagaaaaatattaaaagaatatggtaaatatcattgtgattcttacatcagtcacaaaaattaatttttaacgaagaagtgtgttaataacattgttgttaaaaaaataaaaaagaatattataattaagatcatgtgtaaagcatattctgtttagttaactaatattctcttacgttttggaaagcgacttatactgtggttagtctagagtggaagcacaatctccacatatgtcaattcacgtgcagtccaaataacacttattgaggacagccaacgcacatgtccacatatgccaatgtcacaggctgataggtgatagcggttcatgataaaatgatgcgttccataagttgtttttttgttgacaccccaatcagcatagattttgatttagacatgcaatatttcccgacaaattcacgttctataaagaaaagaatttatttaatctccaaatattattatttcattacgtagtcacgaagatgaaggaagatggccgagtggtgttaatttattccttccttgccaagcttatgatcaaccgcgatgaccgtatctggatcagtgtgttgcagtgttggtaatgaaactatataccatttgacaccacaagtgctgcttacacgacaggtagccatgtatgaatatttctcctgatcatagtcacgaagatcataaaagatatttctcgaagccctctcctttcatcccggcgctggatttatatttaagaggaaaaaggaagaaaaacaatcaacaacagcatatgacatgcaatgtacttaatttcaattgaaaaaaaaatatatagtgaatacattagctacttaaacatgacagaaggcatccgtctaatttacatgtgatacaaaccatagattaaaatagcggcgttttagtgcgctatctcgcttcaacagcgggttgcggcacccagccgctacttctatgctgcaacgcgacggttttcggaggcggcgttgcgtgtggcagatcttgtggcactatcgcaccgctatttccatggaagagaaaaaattgcaaagctttagccatcgggggcagtgttttgaaaattaaagataggttaagggttgcagagaagacgagttgcagagctcctttgccgttgcctcgtcaaatccatacgctggcgccgtcggcccctcaccgcccgattgccgcgaccaagggagtaccacttgtcgcggtaggcgtcaatgagggcgagggtttcatcgggggaccagcacgacggagggagatggcgggaggagggtggtgcagggatggggacgagggcgaggggaacggcagtggggggatcgggaggagggggagaggaggccatgggagagagggttgagggaaagtgggtgtggcctatgggtatggatcgaggaagaacgaaagagaagataataatgcgatgaggcttatcactgacacaatattgagagaaagtgggtgtggcatgtgggttttggtaaatggtttatcattgcaatctccacttcctctgtcaatgtcaacactcatttttattcaccatttaaagcaaaatattttttcctattttttattcattttaatgttatactaaacatttttttaagagattaaataaaagtaatgtttataaacaagaaaattattatatagagaaataaatcttttaatatgaaggtacaattaaataaatattaataatatattaatattaataaaaaaaatatttttatttatttattttagagttaataagcttgtttattttaaaaattattaataatatatcaatattaataaaaaatataagtattatacttttcattcctcatttcttcctatttttgggtaatttcttaacttataacatttatatatgtaatataatttattataagtatttttaatagatttcacagtagcagttttaccgctacccgctataccgcttagcgtttttgaggtcgactgctactgacagctacccgctatttaaaactatgatacagactaaactggaaatgaaattctctaaaataggaccattgtgcatgaaaactggctggtctcgttttgtaagccaaataatgctaatgagatcctatcccacatgctttccaatatatctaccactacagttacaatgcttgaaaaataaaatcaaactatttgagaaaccgcctatcagaggaatgcttaggggtaagactcaataataatcatagttgcaagtttgccttataacaccacaattccaagagtcttgaataaatgcatcatcaacctcacagacttcttcatgagataacatctccactatcacacaaaacacttttgctcttaattgttcggtttcagttttatcaaacaagccccaagagttcaagactacagccaaattatgtaaaaaaggctgagctggagaattatacctcaatataacagtaatcatcacaccatttcttgtatcaggagtaaaaggtaggatgaaacttgtgacactattcaactgtacatgaattgaatgagttgttcatcactgaaagaagtgtttcaaatgaatgaacaataacagttctagtcatgtatgtgtacactggatgaacttatgctggtcgtgaaactatcattggttataatcaatcctatgactgctgtgtaacaacgaaccaaactcaattttttgaaagctgcccactgcagagcaaccaacagctcactttgataatatttgtcataacacattcatttcagtcactagattccaaaatcctatttaaattggaattgttgcgtggcttataaccagcatccttcatgtccatagtcaatttgtccaagatataatatatctcaccactttgagggtgcttctcacctctggatacaaagaagttcacatgcccagcaatctcaacccaactacatcccatttccttttgcaaacctttttccttcatctgatttctcacactatcaacattttcccactctccttcctctgcatagatatttgagagcaaaacatgatatccaccaatccttttatctgtttccatactaagcaacttttcagcaataaattttcccaattcaaagtacccatgatttctgcaagccccaagaatagatccccagatttctattgcattaccatcctcacccaatctctggacaaactcataggcttggaccaccctcccaaccctacctaacatgtctgcaacacaacaataatgttcaattgagggcttaattttatgtactttgtccatatactcaaatacgtgaagaccttcttcaaccaaaccactataactgcaagcagacaaaatggcaacaaaagtaactgcatcaggcttaatccaacatctcagcatcgaatcatacaaggcaacagcttccttacccattccatgctgaccatagctcattatcattgtggtgtatgtgacagaattcctctctggtgttctgataaaaacattttcggcataactgattgcacccaatttggaatacgtgtccactaaagcagttcccacaaaaacattttcgtccaagaaatgatgtatggcaaatccatgaagttgcctagcaaaggtcgtacttcccattgaactacaagctgggagaatcgaggctaaggtcactgcatttggtattaccttgtgaactaatgcctctctaagaatgagaatgactttgtcactgagcccgttctgtgtataaccagcaatcatagcattccatgtggccagatctctatcacttgggcagttctgctcaaataacaactcagaagtcctaatcaacctggatttcgcatacatatgaatcagataactctccataccctcaaactgtatcccgtggcgaattaggtatgcatgggtttgccttccaatgtaagagctcctcatgttggaagccgcagaaagaagggccatcatggtaacggaatcgattggaaacttctgcttctgcatctcgcacacaagcatgagtgcttcctcatccaaaccattctgtacgaaggaagaaattatagtattccacgaaacagcatccctttgagacatgttatcaaaaaccttaaaggaagtgtcaacaaaattgcatctggagtacataaccatgatagcattgacaacaataacgggagtaactgccaatttttttagaacaaatgcatgtagctgatgagccgatttaatttgctgcagcagcgaaagagcagagataacggacagaaaagtgacctcatcgcacacggcctcctctgactccagggctcgaacgaaaacatcaaccccttgaagaggacagttattttgaacataaccaccaatcatggtattccaaacctctgtattttttatggagcaacggtcaaaaaccatcctagcatagtctaagcaaccaagattagcaaacataacgattgcggagctaacagcaaagacgtcattgacatagtcagcaccaaatttaagaagcaaggcataaaacataagagcggttttaggatcagggacagcggggaagacattgacgaaagtaacgggcgacggagtaatggaagttttaatgagggttgcgaaggcgcgaagtgagtgaaggtgtctgtgggttttgacgaatcatgaaatcaaggtgttccaagcgacgacgtttcgtttgggttgggcataaaggagaaaactttgaggacgtagtcgtgttgggattgggggggcaagcaggaggagtacatgttcaagagggagttgtagacgattcgagagttggatggggagcgaagaaaatgggaatgaagggccttaccggcagtgaggttttgggttagggcgcaggccttgagggtggaagagaaggtgtagcaatcggaaggggtgtcgggggtggacttcatttcagcgtagagctggagggcttccaacggcatgtggttgcagatgaagccgatgatgacggtgttccacacagcggtggaggcgcgtggaagagtgtccagaagatggcgtgccacgtgaggttgtccctgttggcacagtttgcttaggcgagaccgaatgctaacgccgcggcttggctttccgccctcaacttgaacaggaggaacaggaacaaccgtagaagccatgaccctcatcctattgctatttccttttgttgtcacactcacatcattacctcttctatccatataattacagtaaaattgtcctactacttcatcaattctaattataggatcacaatagaatgtttataactactaaaagagaaatatattgtaattataaggataaaatggataataaacctaaacaaataagagtataataatcatacatccacaatgtaaaagtttttttttttttttttatattatcaaacaattaaaaatcattatcaatataacttttacaatgattattgtaaaatttaataaagttatcacacactattttattttattatttattgatttacttaaaaaaatattgacacccattagaatacatttgttatattttactccctccagacttaattaaaaaaggaaaaaaaaaaggattgatgaaagcaaattttaactatttgcatcctatttaataatatcatcttaaaaataatttttaattaattgaaattttaatcgaagattattttttattcttaatattaaattaaaaagacacttaaaaaatagtttttaaattttaatactaattccgatcctttacataaaaacaaatcataatatttttttcctaattatagaatgaaacatattattgttttgaaatgtattaataattgatatccttggtcttgatttattgtgaaatataatattgagatattattatttttgcgtgaaagtaaatgcatttatcaaactattaacattatatctcatactcattatttcttaaattattagtaatgttgttatatacaatcgtcactttaaactaattagttctataagcatatttaaaataaattttaaatttattaattaaaattaatttatctattttcatttattttgacgaattaaatattttttatttatttatagaactgaatgtattattaattaactaaaaataaattaattttgtttatatttgagtttgacaaaagtataagtaaaaaaaaatagaataaaaaacgtagtccaaacacttgaaaaggtaaaaacttaaaataaaaataattaaaaccatacctaaacatgtaaaaaaaatcatacctaaactaaaatattaaaattttaattattttcatcctccgttgattagtatcgagccccgagaaagtaggaaggagaagggtgtgtgactgtgtgacagtgtgagtgtgagaataaagaaaagaagagaagattgcatttgcatcaaattgaagaagatggaaatgcagcaactcctcagtatgggcttcccggacgagttagccgcccaagccttggctgccaccggcggcaaatccaccgtcaaagccaccgaatggattctctctcagaaacccaactcttccacattccagcccaagctcgatcgcttcttccattcccagtcacaatcacaagaacatgacgaaccctccaagcgccccaaaccttctccttctccttctccttctccaccacaaccacaacactcgccctctttcttctttaagatcgcagacaagaaacacgccaacagccacattcacgaacccttgtacgagcggttgcgtcccagaacccttgacgacgtcgtaggtcaggagcatctcctcgctcccaactcccttcttcgctccgcaatccaacgcaaccgcctcccctccatcctcctctggggcccacccggcaccggcaagaccactatcgccaaagccatcgtcaactccaccccttctattaactcttaccgcttcgtctccttatctgccgtcaccagcggcgtcaaagacgtcagggacgccgtcgacgaggccagaaaactcagactcaaatccaaccaacccaccgttctcttcgtggacgaggttcacaggttcaacaagtcccaacaggactctttcttacccgtcattgaagatggcagcattgtcttccttggggccaccaccgaaaacccttctttccatttgatcacccctctcttgtctcgttgccgcgtactcactcttaaccctctccaaccccatcaccttgccttgcttctaaaccgcgctgtcactcacactgaccaagggttgatgcagagcgtgggggttcatgttgatgtgagcgaggaagttgttgatttcataagcaacaactgtgatggggatgctcgggtggccttgaatgccttggagattgcagctgttaccgcggctgcaaggctacaacaagggatggaattggatcttcacacgaacgaggaatgcaaggatgctgctgctgctgctgctgctgctgttgttgttagtgttgctgatgcaaaggaggcacttcagtgcaagcatgttgcttatgataaagctggggaagagcactataatgtaatcagtgcgttgcacaagtctatgaggggaagtgatgcaaatgcagctatttattggttggcaagaatgttagagggaggtgaagagcctctttacattgcacgcagactcatacggtttgcaagtgaggatgttggtctggctgatccattggctcttaatcaggcagtctcatgctaccaagcatgccacttcataggaatgccagaatgcaatgtcattcttgctcagtgtgttgcttacttggccttggcacctaagtctgttgctgtttatcgagccataggagccgctcagaaggcagtgagggaatccgcgggacagaatgagggtgtgcctctccatttgaggaatgctccaaccaaattaatgaaggacattggatatgggaagggatacatctacactcccgacaatcccaccgcaacacaaacttacttgccaccatcacttctgggccacaagttcctcgattggcctgagtgacagatacggagttattatgtctttttttttttttttttttttttttgccttttggttttggggtagtaaggagaagggtgcatgctgcattgcaaacgatgtgtgcttctttgtatatttttccaccattgctaagaaatatattgacaatggtgggggtgggggaatgctaaatgctagtgcaatgcatgatgtaaattttgacccaattaaatctcattttcactaatttacttttgaattttattttattcttcaccataggccatacctatcactttatgaaatatttaatttaataattgttcgatgagttcattaaaagtggatgtatgtggcaaattaaaggatcttacattcagcaattgcgcacagatttttcagtaaaaaatatgatatcaccttcaacagaattaccaatttactagtctgaggtgtgcaatactggcattaaagaagctgccttttgttttcttacataggattgaggagttacttgtagaaagaacaatggttggcagtaggtatactacagacgcatcctagacatttgtaattttctgcattttcacgctttaaacggatgactctagcaaaacacgtgatttacaatccacctagtacaacaagctaacattctgactcatcataacaagcacttgatagttgatatacaccgaaaaaagaaacaagctctcttattattaaattaaaaagctgacaaattgggggtcaactgatgaattagatccattccttggggttgatgcatgcgtccaagagtttccattcttcgcttccttcttctggtttctgcatacaaaaggtcaccaacatttcagtagcaatttcataaatggaaaatttaagtcatctaacatccaacttgtttaaaataaagaagattccaaaatcgtacatgatcgtattcccaccgagcagtcagtgggagagaaacaagtatactttctattctccctccagttttcagtccaaatgttgtacccctatcatatacctgtggccaaaaatgttatataatacaaatctgatttgaaagagcagagcaatacattttaagtctaaagttgggttaaaaggtgtaccaaattgaattcaacatatcgtccccttcgcaattgttgccatgctttctgatgatcattgaagggcaaatccttccttttctctatgataggtaaataagcaggaataacagaatttgcacattctgcaagcaaccattgtttgggcagcatgagatagagagaattatatgtctttccagtgagaaccatcagatttataaatgcaagtaattaccagtagcaaaggaaaggagcatctcctgatcatagtcattaagatcatcaaaaaatattcctccaagccctcgcctttcacctcgatgctgaatgtaagaaataagaggaagataaggaaaaacaaccaacaacagcatatgcccatgcactcaacttcaatttaaaaaatatgtataatgaatccactctaaccccttaaacataaaagatggcctccatggcccatcaaattacgtgttatattgactcaactccggtatactcaaacgggagcactgtctatgacaactgacaaacaagagactgaaaacagattaacaattttaaaccttccgacaacatcttcctagtaatcctcctatttataagatgaagaaagtatcaaatgtttcttatgtgttaaggacactaagtagttggcataaagaagataagatagggtaagctatcatatcctattttaatctattgtttggtgagtcgattagatatgataaacttattctattcctatttgttcatcatatcttattcattaattcgaaaattatcctaaggggagagtaagattctgaacaaataagattacatagataaaatttcccttttcaccttcatctcacagtgtgcaactcctttgttccaccaccatcaccaccacaacactgtccgatgtcactgtagccagcataatcgccatgatcaccaccactaccaccacgatcataattgcatagtcatcatcttgcttcccctgcatcacatatcttcttcccattcccatcatttcattattactgacagtcattgctgttacccatttaccaccatttgtttcttgcttattaattatgacagcctccaattcatcatatattaaattcatcaaaattaaatataacagaaagccaaattcatgagtaaacttctattaaaggtacatgaactggacatggaatgcttaatactcactcatcactgttaacctttagactttagttttatcaaacagatcctaagactgctaaaaattacagtattaaaagcttcattgtgggaaaaaggattaagaattataccttgatataaaagtaatcatcacaccatttcttgaatcgggggtaaaacgtaggttcgaacttgtcacaggtttgtttttgaatctacataagaagcatgatttaaagtaagagagattttaagtgccttgattgcaaaatccttaagcatttgccaaaacctttcatagaaatataaagagaaacaaattcggtgcttaacatttcaatgcctccaattttaaatgaaccaagatacataaattcaactaaagaaaacccacctaaaactacaaaaatatattaaaggtactctcaaaaaggaccaaaatcatcaaggtgtggtgacattttagaacaaaggaaattgatttttttctttcatcttttaccaagtaaaaaagccattattggttctaaaccataaaaatgtcagaagccaatacttgtgctaagcacatactgaatggaagtgcttaacatcctcctcaaaaatgtaagctggtgtcaagtcagttcccccaccaaaccaccattgtctaggtgctccaggagcatctgcagaaagcaacagcttgactatcaatagcagcatatttaaaaaaggattcaacaactttatgctcttatgttaacatctctttggtttaatatttgttttaagattttgagacgaacatatagatatagttgtgtttttgtttttttgtttttatttatatatatatagttgtgatttaatcataagcaactgataacaaatagtaatttgaaaagaaaaaaaaaacctacaaagttgaacccgaggtaaccaagcttgaaaaagacggagcagatatcagatcatattagcttctatacagtaatgaaagattaaacagtcccaagcacacaaacaaagcccaaacaacaggaagcaaaaagacaggcatgaaagaagcagtataaaaagaaattgtgaatcacatcacatgagttgaaagtaatatgacaaaaaatactgctaaaatgataaaaagaggagcttggaaatgagcaaagcaaaatgtaatttacctttaggagcatcggtttcaaaatagcgatagttgaaatgtagtgtaggggcaaacgggttctttggatgtaaaacctgaacagaaagacaatgagggaaaattaattagtccaagaaaaaaaggcaataaaaaaaaatgagttgagatggtagagagatactaacagagctgattccagcagcgaagaaaggcacaggaccaggtttttgatcggtaggagcacccttggcagcacgatatgcgtcaggtggcatgacaccgtaaacaacagagacattaaccccagccttctcccaaacggcaccgtcttgaaggaccctgctaatgccaccgccgccaccgggcctggaccaaacgtcctccttgaacttggccccaccatcagcggcctcgagggcactgcaaacggtgtcctgggcctcccttatcatcttctcgaagcgggcccgaaccgaagtggaagactgggcctcgtccactcctctgagaaacgtatccggacgctgggcctccggggtctctttctctatcgaaagggtggctcgcactaggccttttctcattggaggtggcttccaacggcgatgagtgagcgagatcgtagttggagtgatacaagtagcggaagcggagctagagcgaaaagggaacgcgtaggacggagctgagacaatgctcgcacaaggcattatgcttcggattggatttccgacactccaatttgattcgatataagctctgaaaatgaaattcccagatgataaggtcttccttcctttcaaatacttgcagttataaataaataaataaattattttaattttacttttgccacttggtatttatctggggacaaaagggagaagaaagcatggaaatccaatcaacctcttacgttggtttggatgtgcaattctaccttgtttttgtcttctcgatttatgcagaatacaggagttgactatttaatttacataaacggctttactaaaattaaatacagtacattttatttaccaccaagcgacgcggtaaactcttatcttggatttttttttatttataatcataattatctctacttcaatgggtataattcagcgagcagtaacaatatcatgagtgatattagttttgggtccaataaagtagaagatgtctgtggtcagaccaaaaaatagtaaaatccaaatatgattagatatttaaaaaatccgtgtttaaataaatataccaattaatacatggattaaaaaagttgttgggatttaactccttccttagctatgacatctacattatatgttaattatatgttagtccaatagttttttattgcattcccaattatagtaatgatatgaaggtgtttcggcttagttctaaacaagttatctatttttttctctctttttctggccttagtgggatcttcggtctcctattctggtatggaatgaagtacctgtacaaagaatttcgacaatcaactcagttagatcgaaggtttttctaatttaagtttttcattattttttaatttacaaaataaataatggtctttaatattagtaaaaaatatataaaaaatataaaaaagattaaataaaatcatatctaaaaatataaaaagattaaataaaactaaaaaataaaaatacatttatttattaaataattaaattaaaaaattatttaaattatttgaaaaaaaacaaactaagtatataaataaataaataaaattacgactttttgaaatcataaaaaaaactttagtttacgattttgaaatcttaaatcagataaaaaatatcaaatcgaagtcattattttagttttaaaaaaattatacaactttaatgtcattatttttttaaaaaaataattaaaataaaaaaataattaaaattataaaatcataaaataattaaaaaataattatacaacttcaattttaaatatatatatatatatatatataagttaattatgacttttaattaagaagtaaacctcttgcggctgctacctgtttcacataatagtagcctccaattggggtggcagaagcgatggcattttgatggagtatagagctgggagcgcaactgttattgtttagagattgcaaatggttggaagcaaaaaaatttgccccctaaatcttattttattttagttgtatctttgagaaatttctattaaaatcatgtatgcaaatccttttttccttataaaacctgaataaatatttttttaatcaatcaaacaaattttaattatttctaaaaattatcattttcagaatttattatttaacaataaaattcataattttcaacaaccatgatttttttggcataaaaaataactgtcaaatgccctccaaaagtgtagtatcattctctcattagatttaagtctcttttgttcttttgtttgtttctatagaaattgaatccacacaaatattaaaaggaataaaatataaatatcaaattaatattgtggggagaagaaaaataaagagagatgttttattttcttgtactgaaaaaaatcccctaaattggaatgaaataaaataacattatttcattgttttctaatctaaaaataataaataatttaattctaaaaataataaataatttaatttttaaaatatttttcatatattttttttatttccactattcttataactcaaaataaataaggatgttcatgattataagtcatttgctattttaacttagtcaaatatttgggttggattttttttgagtgtttaggtcaaacttaatccaactcattcatgtttaaagtagatcatgagttttagttttaaaaatgtgaactttatttgttggttcggttgattaataaaaaataataactatatatgtatatatttaaattaaaaaaatattattattagtgataacaaccctgtaaagttctttaagtatgtattgtgtaatggtaaacaaatttttaaggacaggatgaaagttcaggtcccacatgatgttgcaaatcaattgaataatgtaggtgcaaatattagaattgtcgtgtgtttggttgaattttgaagtgttgaattgtaatagaatggggacctagatttgtgtaatatgtatgattgtttctgtctatattatttatttaaaactacattgaaatttaaaataaatttaaatttttcatcattaatcaaacttaaattaacccatttgcaacttgattcaatttgaattggattaaagaaatatatacaaatccaatttagtacctaaaattaatatctaaaggttgatttggattgaatcatgaattcagtgacatccaaccccaattaataaacacccctacaaataagaggagaaaaagcttttaacttgttttttattcctaataatacatgtttttctttcaatttcacttttttttttgttctctttatttcacttttgtaatgtacttatttatcaaggtaggtaaatgtaaggactttgatttcagaaccttatatatatatatatatatatataattttaattaattttttgttaataaaagatttttaatgttaaaacagtactctaaaaaaggtcggaaaaggaaaaatgaaattgtaaaatgtcaaaagtaccccgggtctaggtttttctctctcgtccaccgccacgccactcttcactcgcagattcaaacgtttccgaggtgaggctgaggcatctctctctctctctctctctctctctctctctctgttttctaggtatgtgtggttcgtcaatttgaatttactttcaggtaactcttagagttggattttgagtttgggcgaagattcatttccgttaccattattctcccatgccatgcaaccttctctgcttttgctaacatttttgcttttgttttttgtagaatgggagctgggcgtgaagtctccatctcacttgatggggtgagggacaagaaccttatgcagctcaaaaagctcaatctcgctcttttccctgttcgctacaatgacaaatactatgtcgatgcactcgcttccggtgaatttaccaaactaggttctactctatgcttctttctcacttccttatttccacattaatttcattcaccatctttattcttcctagttgttacatatttctttctccttgcttaacgagctactctactgggtttatgcttaccttgtcagggttttgctggggagtcaaatcacttggaatccatttgaaataaataaataaataaaacaatgaacgaactaatttttgttccaatactagttacttatttgcctccaaaaagcttcccatgattggggaatgatcacatggacaaaaagttggctgccaaaaaatatatttgatagatatttccttttatttgatgatgaagcagaagcatatatgtctatatcttggcctctgtattcccttaaggttttcttaagcttactgtacttcagttcctgcacaggttgcctttagcagtttagcttccttcacatattaaagctcaagattctaattccactgtaggatattaggtcttataatccattattaatatattatttttatctgaagatgttttgaatttgggtgttgcaattagtcattgcttacattactaatctttggacaaatgatttttttcaatcttacaaaataatatatctattggctacaaactaatccacgcattcactccagtcattcatagcaaaaccttttaaactttggttcattctttttttttttatttgtttaattcaagttgcacttggtttatttttttaattgatccgaatttcttgttcaattcagaattcttatttcctaccttttgcaatattcttcatgcattttgttttatcaaacataccctttgataaaacaaaatgcatataaaggatatgaaagcctttctaactttttggattcaaacatacccactccctttccttaacaatggggaaataaaactcctttgcagagttttgacaaacatgtgaacatatagcatagttctattggtttttctttttggtagatgtactcagtgttgttgttgagggtgagccatgacacaactgtaaagtcgtgccttagtgaccagttgatcatgggaaacaacctctttgcatatgtaaggataaggttgcatacaatgaccctcccccatactttcgcgttgcgaggagcctttggcaccagggtacattagttttttttttatactctgttgtcaaaattgcgagtaagatcaaaggatcgccttctgattcccttgcatgctctcactctataaagcctaatcacattctctaatctatctctggtctctctgctttctgtgttctgcctcccattaacaataatctgcattctacttccagcaccaacatctctgtttatgcctttgaagattttgccttcaaggggttcaagctttgtgcctcactgccttcaagcttctatttttctgcccgtgctttatgtttaagattgctattgagtattacttatgttatgtgactttttatgatttgtacgtaaccttatgattgtgaattttcaattttagtttatctaaatattgtgatttaggtgttatttttgctatctatgttattttttgtgtacgcatgtgtaagtataattttgcatttttagtaggatcttatgattcatgttacaatcctgggttatataatcttctactcccttcccggtcttagctaagatcttgattttgacaacattggatatgctgatggtttggagagctcatgaagtgatttccccccttctttttctgctttatttaaggagaatatgcactccctgtttgattttgataaatttatccatgcctagaaaaatgtacagagttatctttattggaatacaacacaagatgtcttcaatacttaatcatgtgcttttgaaagcatttggacttagagttagcatgcaagcatataatatttctttagtcgaaccagcttgtttgatatctctgtgctttcagtttgcttgatatatggatgatacagaaagaagggatgggtagacaaggagcctatagaatgtgtctaacaccattgagtactttgcctttgtctttcagcttactatagtgatatttgtgttggagcaattgcatgccggctagagaagaaggaaggtggggggcaagttcgggtttacatcatgacgttaggtgttttagcaccttaccgtggacttggtattggtaagaaagaaactgaatatctttccctggtgattgaaagtttaattgatcatttttttaatgaccttggtgtggatacctgtctcagtaccacaaatacatattaatggtttgtcataaggtgcatgcttcatattgggaacatgttaatttacatctggcaacaatcactgtttcaaaatttatcacttccttttaagctcgttatttttataaactatgcaagtgttgtgatgtgaatcttttggttcatgcaggaacaaagctattgaatcatgttcttgatctttgctccaagcaaaacatttctgaggtttacttgcatgtgcagacaaacaatgaagatgccataaacttctataagaaatttgggtttgaaattacagaaacaatccagaactattatacaaacattacaccgccagactgctatgttctcacgaggtatacggcaagcacaacgaagaaataacatttcagccagttattttgaggggaagtgatcagagattgttgcattgttttatgggttttgccatggatgtattacactaaagtttttttatgttcaatgctagattttaccataaagttagctaaaaaaaaagcagcacttggagatctcttgctaaggtactattatgctattttacccgcttgctctcatctccccccagtcttatcatttccatcaaaatactattaaactacgaattcggtacaagaatctctataaacgattatttaaaatggaggcgcacagagtaaattaaaaaaatcacataaacatattgtaaacccaatttactttaagctgcatcctgtattttaaaactacatctagcttgtgcgtcctgaataacacttgcatgatttgggcccagcaaatggctcgttatcaaaaataataattataattataatataagatatgagagggtctcatggccacgcgagccttcaattgggccccatggtcgtcactggccatcgcacgtcgactgtcgtgtctccgtgtctcttcgcatggttattggattttgtaattattttattttttatcatttgttttaaaattatattattatgtatttgttgtgttattgttttggactgtgttatgtttttgttgatctgtttttcttctttttctagatgtgtttcttcgtagaatcagttaatgagagaaacaataaaaaatgttttttttttttaaatatgcagattttcaggatttttttacaatcaacaaatctttaatatgaaaatcttgagggtatttctattggatcttagaagaatagatcttcaacttaaaatttctctccaagatctggatatggcttgagagggtcctttctacgctttgcaactgcaatcatcattaatcatcattgtatcttctgctgaggcatttgctctctttgctcaggattatcacctttcaccgtgggtttttggttgtgggaaaaggtattttttttttaagtgtatggttaaaaattataatggatgacccaatttgggttggataaaagacaaaggctacacaacataagctaaacttcttacacatagtggaaaaggatttcttagccgttagatatagtgggattaaaatcaatggttaaattttcttctttctttttttgtttgtctttccttctttacccccgattccatccctcttcttctgctatcgcttttcgctggtaacgagaggttgttctctacgccacacctcatggcgttgccactacgagcaataacgcacttcgcccccatgatctcctacttcctttcctgttcgctttgaacatcagttgtgcgaaggatcagatctaatatgaagaatcagtaccaagcattggcatcatcatatttgaagaatcacatcctaggagacctgtgaaggactttgtggtcgccgccgcactctaatcgcgaagggaaccttgccgccggcctgcagcgtttactcgttgatagcagaagccgagaagacgccattgataacctcaccattcattctccgatgaggcaccaccgcctctgtggtccttgacggtagaagagcgaagggaagagaagacgaggaaagagaaaaagaaaaggataaactaggaagcaatcaagggaaatagaagaaaaagaaatctttgtttaaccatccattaaaaataaaagaatctaacgatcaaaaagaatttgcgaacggtatgcaagtattttaactaacgcagcgtaaccttcgtctaaatatgaaactttgtgagcaacttatcttcgaagttagaaatactagcaaaccaaacacgacataatgtttagctttctacttaactgaaccttttgtcttctttttgtaaaccaagcatacttatctcatttttttagtatttattggtttacttctatttgtttcgtgtccctctatttgacgttaaaataataaaattattaagaaattatatttatcaggggtgtctgcgatacatctatgtttgatttttaaatgaaaaattatccaaactaaacataaaattcttgggattcaatctgatttcatgtgaatgtaactaataacaaatttgaatcaaatcaatccaatattttttttatttttaaaatttattttcacaagacttccaaaattattttaatttgataattgacaaaataaattattccaatgtagagtgtaataattgagtcatgatcaacccttaaaaatgacatttacataattatagtaaatgaagcaaaaaaaaaatcacaggttattataattacattacaaacctattcttcaaaaaaatgcattaaaaaccattcatagttaattattcatggagtgtctcttttttttaccattgtttttagtcacaaaaatacataactaaaaaaatactcaacacatgaagttacatattttatcatcaaaattgggccatgacttaggttagaataatgaaaatttatttggaggcataaaaaaataattaaagtataatgcgtgatttacaataggtataaaaaataaaacctaattgcaacaaaaatgtggtttctttgtttgattatttttagtttttttagatcgatttactagtttaaagtgattagattgaattttaaacatctctaacacaacaaacataggcaccaattcataatttcatataaataagagtgaagataatagaaatgtaagataaaatgaatgatgagatgcaaagagaaagaaaaagaaaaaaaagtgtcgtataacttattatataatttattattattatatgaacacaatatcttaaaataattttcaatggcagagaagaaacattaataattattttgacatttgaacgttacacacggatcctaggtgttttatttattttctaaattgtgggctatggtgaaatgatttgatggaagaaagatttatgttaaaaaaagaacacgtggtatagagttgagagtaaagaaaagtagagaagggaagatattatccacaggaggcggggtgagattagatgatgattcatgatattacgtgtataaagctggttggagaagtagatcataatctcatcctcaccattcaatatccaccaggagttggatactggtcgtactattagtgggagcaatacatatcattcattcctagctaatcctctgcttgtaaattaagagcatggctgcacaagctcttgtatcatcatcatctcttaccttctctgcggaggctgcaagacaaactcttggaccaagatcactccaatctccatttgccttctccagaaaagcctcctttcttgttaaggctgctgctactccccctgtcaaggtctgtaattcctctctcactccatttgtttttatgttttcatctatctacacttgtacttaatatataaaaaaactctctttcttttggtgttcagcaaggatcagaccgacctttgtggtttgcatcaaagcaaagtctttcttacttggatggcaggtaaatttcatcctagttcatcactaacataatataacgatatcatcatgtctggatatataaacttctcataagcacttaaagaataaaaaggtgaagtgaagtttatttcatgagttaaaacataattaagttaatttatagtagctctttcgcttaatttctccaaaaaacttatgaaagaaacttaattcattttattccgttcctggaaagcttattcgaataacacttgtgtgtatctattgcaatttagaagagtagtaaataatgaattactatgttggtgctgaaattgactttatctggcatcatgtgcattgcagccttccaggtgactatggatttgaccctctgggactttcggaccctgaaggaacaggagggttcattgagccaaaatggctagcatatggtgagatcatcaatggtcgttttgcaatgttgggtgcagttggttccatagcacctgaaattctaggcaaggctggtctgatccctcaggagacagcactcccatggttcagaaccggtgtggtcccacctgcaggaacctacaactactgggcagactcctacacactgttcgtgtttgagatggcactgatgggatttgcagagcacagaagattccaagactgggccaaaccaggctctatgggcaaacaatacttcctaggactagagaagggtcttggaggttctggtgagccagcttacccaggaggacctttcttcaaccctcttggctttggtaaggatgaaaagtccttgaaggatttgaagctcaaggaagtgaagaatggaaggttggctatgttggcaatcttgggttactttgttcaagctcttgtcacaggtgttggcccataccaaaacctcctagatcatttggctgatcccgtgcacaacaacgtcttgaccagtctcaagttccactaaatctattatatcttgttcgcttcgcagttaccaaaactcaaccatcatgtggacattttttgttccttggtgtgccgctgtaagaattgacatgtaaaacaactagaaacattccacatctttcttttatccttttgctcgttagattaaccgtacccaagcttttatttatttcagccttctgcattccaaattgcactagtctgaataatgttacaattttataaactgtatatgttgtgagagaatttttaaaaaaatcatctttaaataattaatctagttaagattggatctcgccagaatgtagttaaactggaatgaatcctatactcaaatgtgcagcttttaaggcaatagcttaactcccaacatttgtttgacggcaacctgaaatttaaacagcaatcaagtcacaagatttttttaattttgctccacaattatgcatttgaaaatcgttttaattctttactattttgagtctgaataaaaagaattttttttagtagacaaaactcatttaccacgactccgcgagggagaaaaaaagactaaacgctcttgtagagttttattttattttattccatgcataaaatttaaacatgtaactttaagagaaattaagttttcttgtcactcgaaccaaatcacgatataaaaatgtattattttcttctataacttcgaaaaaattcttaatctcattgtgatgtgtattttgcgtggtcagaatttttcgggcgagattatatgcataaaaagacaaaaactgctggaagaacaaggaccaaccaattggtgtgatttcaaaaagaattaaatgaaagttgatatttggtataattttattaaggtttaatgtaatttttttttactatatcaatcagttaaaaattatcttaagggggcatttattttacgtcatgttattcctctattctcagggataccaatgtttgttagaaggttatgagaatttataaccatgtatattgtattcccaggggaatgttatatcttcgtgtttcaagcaaattctattcccaagagaggagggaagggtatatgatattctcatgggaatataactatctattctcattacatcctgatattctctttttacttttacttttttacatttttaattgttctacaattactaaatgccaactaaatatgtatatggaaataacattcttaggcataatattccccggaatgtgattgccgggaaacaaaattatggtggaatatgattatgtgaggtgtaggaagcaaaagcccagagtttcctaagaacaaaaaaatgtaaagcaggccgggcgattcactagagggtccaacagataactaaaaacagagtattgaggcgaaggtgggcttgagtgggccataccgtacagcaaacaagtatcattttcattttggcgaacgagtgcgaatctttttctcttgcgttgttattttatttccttactatctccatctgcatctacatctgcatctgctacgttgtgttgagctttgagatctgtctcgccaaaattcatggttcctttcctctctaaccagttctcttccttttccctttgcaatatgttgctcatgatgcctgcttttgcttcttgttgctgctttttctcctgcatcgattaattttacattcctcgtgtttttgcttctcgttttgttacttgttagctttatcaatggacttgtttgctgctatactttactcttgtgatctgattctcggttttaaagcggacctgcatcgccttttttttttttttctgcttcaaaactattggatctgatttcaatatgttgatatgattgttattgtttattattttgtgcttgcatttggctgttttttttttttctttgaaaatatctggcctctcatgttgaaatgtttattccattgtagatttcgtgttgaatgcatcgtcagagttaggttaattttttgacatttggtgtaaaatggaggtgccaagtaggagaaaaccagtgatctactgggtttgccttttcgtcattgtcaatgcgtttgtacaaattagcaatgcattttatcttccgggaagctacatgcatacttactcaaatggagatcagatatatgccaaggttaattcattgacttctattgagaccgagcttccctacagctactacagtctcccttactgcaagccccttggtaaagtaaagaaaagtgctgagaatcttggagagctcctcaggggagatcagattgataactctccctaccttttccgcatgaatgttaatcagtcaatctacctctgtactacgaccgccttgaatgagaatgaggtaaagctactgaaacaaagaactcgtgatctgtatcaagtaaatatgatccttgacaatttgcctgttatgaggtttgccaatcaaaatgggattaagatccagtggacggggttccctgttggatacacaccacctgatggtagtgcagattacatcattaaccatctcaaattcacagtcttggttcatgaatatgaaggaaatggtgttgaaatcattgggactggggaggaaggtatgggtgttatctctgaagctgacaagaagaaggtatctggatatgaaattgttggctttcaggttaccccttgcagtgttaagcgcgatcctgaagtcatgacaaaactccacatgtatgacaatatctcttcgacaaactgcccatctgagctagacaagtaccaaccgattaaagagcaagagaggatatcatttacatatgaagttgagttcgtgaaaagtgatataagatggccatcgcgttgggatgcttacttaaagatggagggctcccgggtgcattggttctccatcctaaattcattgatggtgatctttttcctagccggtattgtctttgttattttcttgagaactgtgagaagggacttgacaaggtatgaggagttggacaaagaggcacaagcgcagatgaatgaggagctttctggatggaagcttgttgtgggtgatgtatttagagagcctgatggttcgaagcttctctgtgtgatggttggggatggggttcagattcttggaatggctgctgtgactattgtttttgcagccctgggtttcatgtcaccagcttccaggggtatgctgcttactgggatgataattttatatcttttcctgggaattgctgctggatatgtcagtgtacgtctatggaggaccattaagggaacctcggaagggtggagatccatttcctggttatctgcatgcttttttcctggaattgcttttattattctaacaggactgaattttcttctctggggcagcaaaagtactggtgctattcccatttccctgtattttgagttgctcttcctctggttctgcatatcagttccacttaccctcattggaggatttatggggacaaaagctcagcaaattgaatatcctgtgcgaactaaccagattccaagggagattcctgcacgtaaatatccatcatggcttcttattcttggtgcaggaactcttccatttggaacccttttcattgagcttttctttatcctttccagtatctggcttgggaggttctattatgtatttggtttcctgttggttgttcttctattgctggttattgtttgtgctgaagtgtcagtggtcctcacatatatgcatctttgtgtggaagattggcggtggtggtggaagtcattctttgcttcaggctctgttgctctttatgtcttcttgtactccattaactacttggtgttcgacctgcagagtttgagtggacctgtctcagctatactttatctcggctattccctgctcatggcaattgcaatcatgttgtcaactggcaccattggcttcctgatgtcattttactttgtgcactacttgttctcatcagtaaagatagattgaagtttgctttgctatctctcaccaactaagcaaaaggcatgctggaagaggaaattttcttaaatagtataacttttgcttaattctttttgtagcttgattgctttgcagcatgttgagtggggaaatagatgccttgctgattgcagtaattagttgccactcaattttatgttgctatgcgaactacagtttgttccactctctatctgtctctcccgtaagttgtttactcattcaactagtgtttggtatcattctgtttcatgtgatttagttttgtcaagttgtttgaggaagttgtaatttgcacagactgtctcattccttattcaaatatcaagaaaaattaaatggatacttctaggtttcttcaaggtatccatccactgtgcttttgggtgttcgaatgttttgtgttcaaggataggaaagtgacttattcgttaacatgatttttcttagttatccacatacggcttggtaatatattattattattattagcaaaaatacaggcgtgtgtctatatttctattatgttatcatatttttttatttaaatttatttggtcatacaatataataaaatataacttagattatttctatagaggcaactctattatgagaaggtgtaaaaaaagatacaattattattgttctggtatatcaacaaaagctatttgataatacacaattaagagttgaaaggaaaactagaatgcattatttcttctccgattgattaaccttgaaaaggaggagaaagaaaaaggtgaattgtcatccttatacttttgtgtctgtatttttattttattattacattttttgctaataaagaaaatgataaacttttaaatttaatttaaaaaatctcagttgtattaaaaaagtccttgtcatcatttgaaaattattttaaacataaatcaattgagtcaataaattaatcagtgaagcctcctccgaaatagcatccaaaataaaactaaaatgagcacggcaatagaaagtaaaaacatgaaaaagcacacaaaaaaaaagacaaatgcaaataaaccaaagtgatttatgcgtacatgacctatttttaaaagcactgtttattttagtgaatggaaatgaaaaatgaaaggtttgattcctgaaaaagagatgcagaggaggaaagggataattgtaaatgggagagagataattgtgaatgtgaaagagtcaatttgaagttatgttatgcacgttcatgaagtagaaattatttttgaataaataaatcggcgataactgccgtgagtgagtgtcaatagaaatgaggagaaaaaaatttctaaaacaagaggataagaaaggtaaggaaagtttgaaggggagatttacgggaatgagaaaaaggataaaataatgcagtggacgtgtgaacatagtagttgaagggagaattagagtttgcaattatattttgaaaaatgtaaaatatcaaattgtgtgggagaagttgcagtaagccagtaaccaacaccttttctgtgagacgcaacaattatttttgaagggtaaatttggaaacgaaatgtgtacaaaaaggggtaaaaggtcctgggagtgttgttatgaagtacgaaaaatgtagttatatattgaaagataaattagaaattaaaaatatgtataccaaatggaattattttcaatatacagattattattatttcatactacttcatactgagaacatacatatttgtcgtggatgtggaaaaaattaaataaatgtactgaaaacgacctgcaaaaatagaccagtctattagtcgctggttcatggaattggatcctgtgatgttccttttcgtattctggtaaagccaaaacaagtttaagggatcgtgtacaaataaggtgagtcttgttgtgatgtttgtgtctttatcttaagtctgagagagatatgcgcatgtttcttttcacgtctgattaacaatggacgtggaagctacaagttgtggcatcaagatgaacccgcatgatgtccctacgatgtgaaaccaaacacatgctaaatttgttttcagtaaatagttagtgtggagaggacaactggttcatttgtctgtctatctaactctcttgatactgtcaatctcatcacaaaaggaagctatcctctcctgctgctgatactagctagtatcacctttgttaggagttgagtttgttggttggttttcatgtatcctaaaaaaaagaaaaacgaagaaaaaaacatttataaattacaggtgttttgtataccttcctcgtaggttttgtatggttctgataacaaactcccggccacgctagaagtgaaagaattataacaaacctttgttataaggattgcttcttctggctagtattcccttagccatgctcttcagtttattgtttatccagtttggcaagttacaagagaaacttttgcgtggatcttgtctgcacaagctatttagactaaattgattggtactatatgcaaaattattttatatttgacacattacagaaatttgttttttgacaagataaggcatacacaataaattcactctagtttttctcaactagttattcaaataaaatcctaaaacaaacatcacgagaaaaaaaaaaaaaaaaaaaaaagttgccagcaagttattgtctaacagtagaacattacaacattatattgggatgggaaccccgttccaatctccaagacattccagaatgggatcaataatctttgcttgacacatggctgtatatactttttcaaattcctcatctggtgagagagtcttttctccggtgagcaaccctatctctaactcttccctcacaaacttgtacagtggatatgacctacactcctttattctgtttggaattgctggattgccattctcataagccacccttgcactttcaacttcctttggcaagagagacttcaattcatcctcaaaagctccaatcttctcaaaaatcaacaagctcacattcttgtcattaatggcactaatgtgtgcttgctcataaagtacttgctttagttttggcatcaatgggtacgtaacattggagggatcatcaatgtaggaaaatacatattctctatcgaccactttaagcaaatctttctcacaaagtcgaaatgggttaatttcttctgtgtcttctgtaactaatgttttctgtgcaactatgcttacagtattcttgaccgtgttcttgaaaatttcctctaaatgcctcaagtcaatagcttggcagagtgcaaccagataagtggaagacatgagctttaatatctcaacggcttcgacagttttcaaagcagaaattaagcccaaagagttcacatcttggtcgtgctgctcagcactttgcccatggctcgttactggatttgctagatattgaagctcagaacaataagcagccatggcaacttcagatgccttgaaaccgtaatcaagacttgggtttctaccagcagaaagacttgatggcaacccattgttatacaaatcattgacaagctcagtaaattgggcgaagatgagtttgccgattgaagcaacggctaaacgtgtattatccattgaaactccaattggggttccttggaaattaccaccattcagagccttattccttgtgacatcaatcaagggattgtcatttactgagtttatttccctttcaattgatttggtcgaataccggatgatttcaatctgtggaccaagccactgaggagaagttacaagagcataacgatcttttctaggcttctgcaacggatctggttgttgcagtgtaacatttttgacataagagcttccatctagaatgtgttccataatagctgcagcttcaatttggccgggatggtacttcagcttatgtataagatgatgtgtaaattctggcttcccctatgcatgacttcagcaaaaactgctgacagaacttccgacagtaaagctaatatgtttgcctcaaaaagcacggtagaagccacgccagacccaacggccgtgccatttacgagggcaagaccttccttgggcttcaactcaaagaacccagaatctagacctgctaaatggaaagcttccttagcattaagggactctccagagggtccaacagctttactgtttcgcctaccagttagcaatgcaacaatgtaggacagaggaattagatcaccagacgcagtaattgtaccacgtaatggcaagataggggtgacattgtggttgagtagtttggtgatagcttctaagatttcaaatctaattcctgagtagccttgaagaagggtattaaccctcacaagcattgctgctctggttgctgatttaggcagtgtgtgagataactctgtttggtagccaaatattgcgcagtttaaaaaccttgggaaggaaaaatggaaaatccgtaaatacataaaccaaaagaagaattaaattggaatggaatggtctatatactgtcatataatatataggttgttgtcacatatataaaagtaagttgacttttataattgatactttgaaagatatatttgaaatgaattttgattagtattgacaatgaagttgcatgataattccaagatattgagaaggaagcagagaagaagcagacctaaccatttccttctgaagggcaaggccttggtcagttcttctgtgggaggcagcaccaaagccggtggtaacaccataaatgggagtgcctttgttaatgttttggatgatccagtggcagctggcgtcaacgcctggccttgaagactctgagagggaaaccttagcctgcaagtaatggttgggatcggcaacagcaacagaagccacctgtgatatagttagtgtctctcccccacccagacagacaagtgggttccggtactctgccaccatgcgtttcacttcatcaaagtggctacacttgagtgaatctgctgcctgactccagttaagggggtcactttctggaataatgctcgccataccactacgagaggagagttcaaaagttgtagagttttcagaggccttgaagctttaagtagagctagagggttgctgacatgtgtcggggtaggtgattaggtgcttctatctaccattcacccactcattttttgcatcttacaattgtagcttctcaaatactgtctaagtacaaacaaccagattaaattataaatttggtcactgtctgatattaattttagtttcaatcataactggcaaataaatttatattttactactctctgcataaaaacatatttcaatttttttcatacacggcatctaatatatataaaaggttttttcttttttttttaggaatgaagtagtaaatttacctggtgcatgggttgcactggtatttatgtatgtaccaaaatagtttgttggtttgtaaatataatgttttaattacaatttgatttgataaattatttaaattggttgttaataaaattttataaacataaaaatatatatttaaacgttttagctagaactcatatttttgaatgatttaagacacattattcttaaatcatttaaagataagaataacttcttcttttattttatcaatatgatgtgttgaatataaccgtataaattaagagatatatagagcgcaagttatcgtctcttagtagtattgtagtaatactactatataaaaaaaactttaatatttttataatctttgaccgacttaattatttgtataacacgcatatttcattattttaataagaagacataaaccttttccccccacgtgttgtgataaattcctgaaagtatacattttttatttgtgtagctaaaacaatgtattattgatagaaaataaaaagaaaagaaaagaaaaagacatggaatagtattagtaatgacaggtttcatgttcccgtaaaaaaaaaaaaatgatgtttactttgttattacattacacgcagttaacagtaatgaaaacttaaaattagtaaacataaatgtatagaaatccgtgaaaggtaaggaattataaatgggatgtggaaattataattactctgaaaatcacatcccagatgtatatggtattatatttgtgtgtgatataataaaaagaggaagaaagaattatttgtgacgcatgcaagaaggtttgaaaaaagaaaactagccgttggcaagggtacttcatcatgtattagttgtacattgtgattcagtgctttaggctcctctctttcctttgcttttgcttttgcttaattcattgatctaaattctccttcctctctctgactctggcgaagatgttcaccgaaggactcgacgagagcgcaatccaatggatcaagcaggtctcctttcttctttcttctttcttctttttgtctaatctaatgctacctctttgtttctttttccatctttctttcttttgtttgattctttattagggattccattccttcactgaccaatttatacatacaatacaatacaatacaatacagggatcaaaagtaccacttgatgttgatgtcgaagagcctcctcttcctcagccacgctctcctctggccgagaaaatcagctgcagcagcgatcgattcccacgatctcctctcttgagcagtgccaactctcttaattctcccgttctccctcccttgaagttccactcggctttattacaaccgcgcaacctcgcctttgccgatcacgatgacagttacgaaagcacggaggatgccaatttctccgatgacgaagtctctgctcccaacaaccttgatttctcggactctccaataccacactactatgacgaggaacaattgtttggatgcaaaggccgcagaggaattctcaagacaggtttggccaatcaaaacctaaccattcaggttcccaacacagttagaaggttcacagatggagaaatgggtttcaatataagtcttcaaaggaacctcactccagctggcgctgccactgttcagcttcaaaagcaagttcaccttcgcaatgtgaattgccctgatgatgacaccgttggtttgggtactccaagtgcccctcccatcattgattctgattctccactggagagggattcagaatgctccctaaggaacgaaccaacttaccctcctggatcatggccttcaagagaatctctggattatgatggcacaaaaagtgagacttccattgaacaaaaacccaagcccaacactgttgctaaacccactgtcgctgagctcgctcaaaggtgctgtatttgctcttttttagtttgtctgtttgcagttctccttccaattcctaaccagctctagtgtccttccttataatattaaattcaactctgcagactggacaagacttttacagatgacagagaaagacagacccctcatttacaatattacaacaccaggtgctgtctatcttcaacttttactttctatttaacaattatcaaattagctgtcaaccttaacgaaatatttagtttagtttgaatccattaatactttgctaaaaaactaagtaccctgttacctggaggctccacgctatgcgcaggtaagggggatggatattgtacacaactttactcttgcatatgcaaagaagttgtttccggattcgaacccatgaccaacattaatactttgctaattatagcaaaatttaattaatatagttatcttgaaattcacatttatatgctcacttccttttatggcatgttatgttatttcagcagttgcaatagtcaatatgcctggcaaacccttatcacttatgatgcctgcatacgtttatgcctacaagcatgggcaaaaggctgcactgaggccccagagtttttaaaagatgagtgcctagctctccgaagtgctttagggtgggttccattttgttttaccaacacatttcttttggcttcatttattgttctcctcatttctgttatttctctatttccatagattgcatgagttcttgttgcaacctcgaggtgtcaagccaactgaaggcagaaataccaggaattcggaacaaacagttcccctgaagattaagaaagttgtagggaaaataagagtggaaggtaatcttacaatctcaacacatttttatcatttaaatgtaatatgattataattgtacatggatgtatggaatgacattttcttatggacatattttagaacttcctaatgtaactatgttcataacgttggatctccttcaaacaacttgagagctgtataatctgacatcctatatgaaaattgcagtgaagaaacttcgcattataccaagacaaaaacttaagatcacaaagtcacagcgaggatcaatctacatgcaaactggggtggagtacgtccggcatgtttcatcacttgtgaaaaatggcataaattctatgaagacggcctccttctccttggcatctgaaggtttcagcaactctttcgttttatagtttagaaatctttttgatcttgataatgagacttgtattagactgtaagagttacatattatcaggatttaggagtcatactttatcctccaccaaatgaaatgggcttttttaatatagatttttttcctttcataaacaccaatccttttaatgaatgaattaaaggtatctgttttattcttgtagagccactacattgttcgatccaacttaagagtacaacggaagaaaatgaatcagagccatgttctgcaattcttttgcgccctggaagtggagattaccatgatttgtaagtttcattttttttttacttttatattttaattgggaaaagtgtttttaattgacctgctgtttggctcttcttagaaaatagctaaacatgatagtcggtgaaggttttccaaatgcattttagcaggatatttatagtagtagacaattgatgaaaaaccaatcttaacagttgatatcatacactgctttatgttctaagtttcttccagtacacagcctagtgcataagatggcgatttacattgtacattctttaagacaactacaatcacatgttgtcttgatttcttcaattgttgaaattcgcataataatcataaagattctgaactctcacctactttcagtttcccattgagccaaggggacgctttaattgtagaagtccaagattcaaaaaaggtagtccatggtgaagccaggattccaatttcatccctcagtgataatcctgtatgagctctaccctttcatcgtccatggatattattctctctcttgcaccttccacattcacataatgaattatcttgaatgtgcagagtgacagaattcggtggtggccagtatatcatgatgaacgtgaatgtgttggcaagatccagctctctattggcagtacaatgacaagcgatgagaacaatcacataaaggttctgtctctagcaaaatttagttcaataaatcttgttttatctaatagaaatattcaagttagttgatgtaagatcatcttccaagttgacatctcaggactaaggcaaagaagtaactgtttaggatacatcttagatgtaatatatcgaaaaattgttctcaagaactagattctttctgagattaaccatggagaggatcatacttatcaccttgtttaatcatttgttggtattaaaaagaaaactattctaatttgatcggacaaaggatcttttatttatttattgaaaaggctcatcatgatttaatattgtttttatcttagtttaaacttttggccattaaacaccaatatcaacatttctggctatgctgttctgagcatagattcaggttttcatttgctcggtttgtacatttctgcagagtgcggctgttgtggaaactcaagcttatgatttattattggagggtgccatgcgtgcacaacatttccactcccgaaacttgcggttaaatgggccttggaaatggttgttagatgcatttgcggactactatggagtttctaattcatatgccaagctgaggtatttgaatgtgtgcccccaaaaatatgaaaataagaaacagttttctgatattctttatgctacatgattttcttttaatttcttcatttttcttcacttacctgtggtggttttcttgtagatatctattacatgtgatgaatgtggcaactccaaccaaggactgcctagagcttgtgagagagttgctagaacccctcataaaggccagaagtgagaggagtctgaccaggcaggaggtaagtcatatattgctctctttcccgttgcagtaatttaccatatcttgtaatttggtttgcttaatcttatgttgtttcagcttctcataattttaatatgctatgtcaatggcattagtttagagttcagaccaccttaatacttgtcatacatatctagaaatggatggtggtgtaacagttttctctgtttgcttgttctcacagagaagtatactttcagactgtgaaactcaaattgaaagtcttctagcgacagtttttgagaattacaaatcgctagatgaaaactcgccaacaggtttaacagatcattttggtccagcatttgatgctgctgcaccagctttagatcctgctgttcaagtctacacaagtgttcatgatattctatctctagatgctcaaactattctaagaaactatcttcaggtaattccaaatttgcagagttactgataactaatgctcttgttcaacatagtttcaaccatggatgtttgaagtatatttatggctgcatgtaaagcttggttttccttttttggagtctaaatgataaggctactgtcaacagactgcagcaagaaaaaggtgtagaaaacacatgatggagactgatgaatttgtgtcgagcacctctgaatgttacctaatggataccattaccatctcaacggcatacctgaagatgaagaatctttgtgtttcaataagaaatgaaattcaagcagacataaagatccataaccagcatacgatccatggtcagcatatatttccaaggtagttggctataacagctctctttagcaagttgacaatacagttaacagtgcatacaatttgcaattcaattctcacacataattataatgaggggttgatatttatcttttttacatcccctacatgggagatgcaattggtctttattaaatttaaacattctgcaactttcaattggcataacagaatgttattttctcctgtttcagtcagagtttctcattatcaacgtcggtacccattcatccaatgatagcattactcaaattctcgttatttttctctgtaaattttaattttggttcatcatagattttctgagttctattttccaattttcagttcaattgacctgacaaacatcacagcagcagtttacagcacagagctgtgcaagagactgagagctttcctttctgcattgccaccatcgagtccacaggcacatgtaaatgagcttctagttgcagctgcagattttgaacgggatttggaatcatggaatataaggtttgtgaaagaaacttctcccatgctaatgcaaaatgcagtataaaaaagacatgagattccccaacagtaaaatatcatttcttactcgcaatactcttcatgttccagtcttgtgcagggaggcgtagactccagaaatttgttccacaattatatcatggtgtggatacaggatatgcaacttagtttgcttgatttatgtaaagcagaaaaggtagtagttattttttttttttatatatacaacaaagcacttcagtctataaatgacttgacctccccaataatgacacaggtgccatgggctggagtaatcacaaaccactccacctccccatttgctgaggaaatgtacgagaaaatcaaagacaaccttacccagtatgaagttgtaatcaacagatggcctcaatactcactttatttggaaaatgtaagttctaaattagagatatttctgttaaaccatcagcattccagatatctttttctatagtgtctccctcctctcatatatataaacaattctatctccactgtataaaacatgtggtaaataccttgactttgcatttttcttaccctttctttctgtaaggctgttgcaaacattgaaagggcaattgtgaaatccctcgaaaaacaatacagcgatatattaactcctttgaaagatagcatacaaaagagacttcacttgcaagttcaaaagatagcaagaagacaatcagctactgttcatttggttcctaatcaagtaagttctctgtatgcttttgcattaggtccatattctaaaatccagcttaatttaagtactcaaattttaagctcactcaaacttttgtggcataatagaaaacatgcaggattttggtttcttataacattttgttttatccacagttgggaatattcttgaacaccctcaagaggattcttgatgtccttcattgtagagtggaagacatcctaaattcatgggcatcctgtctacctgtcatgggagataagaagacactgtttggggagcaaatgaatggaatcactgttctcttgagaaccaaatacaaaacttatttgcaagcaataatagggaatcttgtcaacaatgtaagatcattcaaactccagttttctacgtttgttctatgttatcgtaaaatggataacaatagtgagcataaagtttttgtttagaagcctcaaatatttatttacatttgatacaattgaattgttcagacaaaagctaatcggaacacaaggctgaaaaagatccttgaggaaacaacagaaacagatggagaagcagaagtgcgtgaaagaatgcagttgctgaattcacaactcactgacttcatctccaatctgcatgaggtctttaccagccagatttttatagcaatatgtcgtggattatgggataggatgggacaggtaaccaactattttaaaaactcctatattattggttcatatttttttctttctcggatctcatttattttcattggttttgtgatagattattttgaaatttctcgaagggagaaaagaaaacaggatatggtacaacggctcttcatatgctctgggggtaagtcaatattattagattattttctgatgatgttattgttgattgcaatattgcaccgttgacgttgattgtttcactttgcagatattggatgatacatttgcttcccaaatgcaacgattacgaggaaatgcgttgcaagaaaaggatattgagcctcctcgctcagtgattgaagctcgatctattctttgtaaagacacggcaaatgcaaccgatacatctaattacttctatatataatttagctttatatatatatattgccaaatttccttgctattgttgaaatgtccatccactgtacatgatcgtcaagtcaaatataaacctggtaacgtttttctttttggggggagggggattcattttattcttttgcatctaaatgtaataatgtactattgttcagacttcagaggttgaataacgtgatagagggctattattcttcttgttaatttcctatcaatctaaacacatgatgagagtgtttgatctaaagaaagaatccagaagaaattgcatagataaagtaagaaaatattttatatttatagactttttatttgtcttatctgttaactttatttatatttttaattaattttgtcttttattaattttcttttgttttttattactatgattttatttttcacatttttgtgtgtagttaagggattttatatatatatatatatatatatatatatatatatatatatctttttgtttttgatcatgtcatatttacagtattagtcgtataaatttgtattaaaattgatttttggatttgtatttggatgtttttttctgctgaattttatatttggattatgaacatcaaattataaataaatgacttaatcggtggttgataatgttagaaaatagttttattaaatttttgtaaggtttaagatgatttttcctcttaagagaagtttataaaatgaattttttatgtaaaccttaaaacatgcgttaaaaaatgaatttaaatatcttttaagttaacatgttttataatgacttcaagataatgttatgcttagtttttttccttctaaacaagtaaataaataaataaaattcattgtcctaaattttatttatttattaaatgctagcataaaaacaaacatcattatatatttctataatttgttaattttgaatataaatgtttaaaaatgataacaaactaaaaagcaggaaacatgatttgaattttttttttgttttgtaatttcaattagaaaaatatttggataatctttactctctacacatttttttatatttactttatatatttattcatttttcttatttttctctacaccacatatctaactttgaaatatataaaaaatcttcataattaaaatatatacaccccttagaacacagataattaaagatcaaaataagaagaagaaaatcaacaagtgatataataatgttattatttcaatgtttcataaatacatataataaataaaatgatattcaaatatataccacaaataatttgatgaattatgtataaataaacatatatttaaaaatataatatattaatttatcatgttatcataacaaataaataaatttaagtaaaattatgtatacattacaaaacatattaaactaaaaataatatgacatcaatttatagataataaaagatatcatttcaatatataaattttagcataataaagtaggatagcttaatagaaatacgaacacatatacagtaattactataattattaatgagttaatgattaatttattataaaaaaaagtaatgatcacttttttaatagttcaaacgtatcttgttattttaatgaatcagtgattattatttttagaggtaacgtatatttattattatccatgggatacaaagttacaaagtatgggctggaactggatatagaaagaagagaagcgaaagggcgcgagggggaaatggcgaaatgaagggagggaaagaattagaaaatggaaaatattcaaaagggtgattccctcgctccggaaaatccgaaatttggatattccactttctcacttttccctataaaacaaaaaagcacccgaaattgttggcagtggaaaatggcgcagcttccgtgcgactccgatggcgtgtgcatgcgctgcaaacacaaacccactccctccgaaaccctctcctgtcgaacgtgtgccactccctggcacctttcgtgtctcccttcgccacctctctccctttctgattcccactgggactgccccgactgttctgacacctccaatcatcaccccgtcgctccctccggtgaccttgtctccgccattcacgccattcagtccgacccctctctcactgaccaacagaaagccaaaaaacgccaagaactcctcgctggctctgccgacccctcaaaggacaaaaccaaaaccaaagacatttttgatggaagcttaaattgctccatatgcatgcaactacccgacagacccgtcacggtttgtttcttttgtcttctctgttttttttttttttatcatctattaatttttgagtagtcagtgtgttagtttcctcaatttatctttcagacgccatgtgggcacaacttttgtttgagatgtttcgagaagtggatcggacagggaaagcgcacttgcgccaattgccgtgctcaaatcccgaccaagatggcgagccagccgagaataaactctcagttggccatggccatccgattggcgaaggcagccaagtcgggaggttcttcgggtccatccaaggtgtatcattttgtacgcaatcaggaccgccctgatactgcattcaccacagagcgagccaagaagactggaaaggcaaacgcttgcagtggtaagatttttgttactgttcctcccgaccattttgggcccatccctgctgaaaacgaccccaccaggaaccgtggtgttctggtcggggacacgtgggaggacaggatggagtgtcggcagtggggtgctcatttgcctcatgttgccggcattgctggacagagtggttatggttcccagtctgttgccctttctggtgggtacgaggatgacgaggaccatggtgagtggttcctttacactggcagtggtggcagagatctaagtggcaataaacgcaccaacaagctgcaatcctttgaccagaagtttgaaaacatgaacgaggccttgagagtaagctgcaggaagggttatcccgttcgggttgtaaggtcacctcttctctctcgatcctaatatttttcattcgattaccaactaaatgcatttttctgagtatcacaaatttattttgtgccgaaataacttttgttttgttcaggtcgcacaaggaaaaacgttcttcttatgcaccggaatctggagtgcgttatgatggagtttatagaatagagaaatgctggcgtaaaaatggaatacaagtaagctacttctaatgataggcattgtgtttattgattgaggcctgggaatgtatttttccttgatagttttctccaagttttttgattcatggagaagctttgttctgtgacagggttgcaaggtttgcaggtatttgtttgtgagatgtgacaatgagccagcaccgtggacaaggttggttggttctttctttgctgctgtttgtttgtgtgcttatgtgttattgactttattttgttgatgtgcagtgatgaaattggagatcgcccacgctcactgcctaaaattgatgagttgaagggggcagttgatgtaactgaaagaaagggtgatccatcatgggattatgatgtaagtgttgttctggtcctttagctgttgataggttgatttgtgtctggtaggattaaatagtgagacaatcataattattgtactaaagagttttggaaatcgttctagtggtacatgttccactattgatgttctataatctatactttgatgggtctcactcagtacttttggtgaaatataggaggaaaaggggtgctggttgtggaagaagcctccaccagaaagcaagaaatcagtggacattaaatctgaagatggaacaacaatcagagttaaacgaaaggcaaaagatgtgtctgtgaaagaaaggcttttgaaaggtatgctctgtgtacatgttcccataatttaccctgtatagactacttataaatcttgtttgccttattgttttttaaaatcccattgcagtcaattgaacttgtaaaatctattcaattttgccactgacttccaatttgttcagagtttggctgccaaatatgtctcaaggttatggcttctcctcttactacaccttgtgctcacaacttctgcaaagcctgtttggagggtaccttttctggccaaagtttcatcagaaatagggcatgtggaggtggacgcactttacgagcacagaagaatgttatgaaatgcccatcttgttcaaatgacattgccgactttctccagaatccacaggtactactgaatgccattattaggttttatatttgctccaagtatgcttgcaaaccatatttggatttcttttaattattcctagtttacaatgaaatgcttatgcctattttttgaaaatatggaattcaattagtaaaacggttcatcttgaataaaggagaatggtagaaatatattaaggctttattttgagctcgtgtatatgctttttataaggcttgaatatttgttgcaaatactactggcactaatgaaatacattctggaatttttcattcattgtattcaaattggcattttatttgtaagttttgttctacaattttctggccttttttgtacaggttaatagagaaatgctggccgttatagaatcattacaacgccaggctgaagaagaaaattctgaagagtcaagtgataaaaatgatgaaaatgtgcatgatccaacagaggtttcaaaaccttgtgattctagtgataaggtgttggaggaaattaaggacaatgagctgaatcagccacacaagcgaaggaaagagtgaaggatgactgcaagttattttggtcctttggattatggattttcattaaatagcaagggacggactgctgatgcaattgttttttagtgctagcatagattgatggattttgactaatatatggatttaaatatattttttgtgcgttatgatcggagtagaggttcatgtgatagaatattggtatctcctttattgtgggtttcatgtctctagaaggagagaatgaatgcagtttacactgtaatgcatatcttaatgcattctgtgtttttattaaagatgttatgtttactactacatttaaacaagtttaaatttaatattgacttctggtgtaaacttaaatgaagagccaagtgataaaaatgatgaaaatttgcattgcccaacagaggtttaaaaaatgatataatgataggattaaaaaacttcatactactacgcattgtaggtacacagaagtatacacgaggtaaattctgagaagtttccatcctttgtgggacatcaacttgtgaatgtagcttttgattcaacttaaatttgctataattggctcacaagtatgtttgtctaaatatcttgcatcaacttgtgaatgtagctcgaggaaattttgaagatttgagcaaggtgaggtttaaggaattaggtaactaaatctgaaggtaagctttgttatcctctaactcacctttttatccaatattataggattctttttttttttttttttttacaacgttttacccattaggttattagaatacataacctttttttttttttaccgatttagcatgtgtattgttatgatataatttaaattattgatggattgaaagagatagaaagttgcattgttaggaatattaagttgcatttatatatatatatatatatttttttttgaatttgatttatgataatcagttataaattgttaaaatttaaaagcttaagagcatattatgataagagaatattgaaatgaaatgaagtgaatgttagagaatgaaaatctaaagtagatgaacttatgcgttttgtaaactaaaagatcattatcttttcacttaaagagaatcaagaatctgaaccacgtaggtcaataagttacaaagagagtcgaaaaggtaaatctagaagactgaaaatgaaaattcgaggaaagtagacctttaagtttaattattattacattacattagtagttacaaagaattttctaaccaattttatatgctcatcagcgctgaaatttcaacttccaagtaaattaaaaaaatgaaataattacgtagatatgttatgggttaggatcatttgtcaaattttgcacaatgatatatttaattattcgctcgaattgccgcccttctcatgtggtctgatactcggacacgtttttgtattttatttaaagtattagttgactgacttccggtcgtctctcaaaagtcttcgttattaattataatgcaaaaatgattttttttaataaataagaaatcaagaatcagatcattttcttttcttttctttttaggatttttcttacggcacctattcagtaaccacagactaatttctctgtttgataggtaaaaattatttattaaacaaatttaagtcactttattaagtaatatgtacgagtattataaatatttttatattgtcttctgttcttataaataaaaaaattaagattatttttcgttgataatgtttaccatttttaataaataacacgtattgagaaaaatgataacttagtatttattattaatatacaagattgaactctttaagatcttttttgctctctaagttaatactgttccacttccatgtatcatttgaaaaaacaaaataacactcttgagatgtctataagtctattgaagaagacataaagaaaaagaaagaaagatgctaatagtaattgagtaataagatgtaaattgtaaagaagcttttgccataagctttttctgcgtaacttctaacacacgctgaggaggacatcccctatttatatctcatttcaccatactgtccatacgtaaatagagccccattcccctgcttacatagagagcacttttcataaaagttaaattccaagagaatgaagaagatacaagtatcaatcaagtttctgctttgtttatctctgctctgtcttttgttctcttcatttcttttactccttcaatccttgaagccatccctcatgcaattcttcagctacatggttgaaaaaagctacatgttccttctctgcaatggcctccttcttgttttaatagccatcaactctgctccaatcaatgcctcttcactaccaaccactgaacatgctgctgtagctgttcacatagaagagaaaagtagccagttagaatccaaggaaccagacatggcagttgcagcaccaattgctggtgaggaaactgaatccccacataaagaagaaaagattttggtgagagtagaacaagacaatgttctatcagatacccaagaagaagaagaagaagaagaagaagagggaaatgcccttgtgatcattgatgaagatgagcatgacactgaagagttaaataagaaatgtgaagattttattaaaaggatgaaagcaacgttctcttccaataacttggagctaagagctgtcaacagtttttattttgataatcagaaattgctggtggctgttaattaagtagttgtgaatcttagaacatcatgtatctccctttcttttgcattgattttaactaacagggtgtcttagtttccaagtttttttgccacccagatttttgcttgtaggaattaaatcctgccctaaatggttctgtcagactatgttccatgttctgttctctgttccaatggaaacatcaagctcactctattttattaaatgcacgtcttgtttactacagtaattaactttagcatctctttcaattataaacattttaggtttacacattcaacttgtatccatataatatgattcagttaaatctaattttcatttaacccagaaataagtaacgtctaacataactccattaactcgtaaagaaggatgctgctaaaatggccatttgagttcaaaaatatgatacttcaattcgacttgttttgtttagcttcttgtgagagaattccgtccatctggcagccttataataaaattcaaccaatgtcactatagtagataaactttattatatatcatcgttactgatttgagcatcaagactattttttttaacaggtatccaccctatccatgatatctcaatcgtatcacagattaaagagtgcactttagtgagcgttaccccagtcaaaatcatcagctctatcttgaatgcgctttttataaaaataaagtgttttgtattcgctctgtgaaacatttgtttttgggctttcataagctcctgagtggaaacttgagcaatgtaaaaaataattttggatttgtggaaaagttccctttctaaaggcgggtctggaaaaagaaaacacggatagtttataaacaaaatgacttaaatatatttttaatttttaataaatacttaatttttgtgtttattttctaataaatttttattttacttttagtccctaataaattaataattttgtttttagttaatgacacttatttgtaatccattataaattaataaattttgtgtttgtttaataaatcttttttatttgttattagttgggactaaaataaaatttattaatttattaaaaaataaatacaaaatttgttaatttattaagaatgaaaacataatataagaactgaaaataaaaatattattttattaacaattcacacaaaacaaaattttattaaaaaacaaacataaaaatcaaatatttattagaaataaaaacatattttaatctaaagaaaatttgtcaaatatcttttaacctttcattatctcttgcaattcaaacacacaatcaagctaatccttattactttgtttaccttttttatattatatccagaaagaaaaataatagagtgcacagcgtattattgctgacatgttattcgggttaggatcagctacagttttgttaagaaactgtatgggatctcatcccttcatttaccaaactatctttaatatttgaaaacctcgtatatgacattagtaactgcattgggttcaaattttcaagccgcagagatctaattctcagttatgcttatttaaagtggcagattttaatgtgtgatagatagaaagaagaatgcttacaatatactcattttaatatatatatatatatatatatatatatattttatgagttaaaattgattgcaacttggcttgaaaatgtattagagaggatatttacagcatttctgtgcaaggaaataatgtatttaacaggttgtgaatgaaataaaataaaggatgtttgaaattgatacggtggcagagtcaggaagggggccacgtagcttcctttgttgaattgaaacgtacgtccttctcaagttggcacaataatttgacaacggatctccaagaaatttatatgcggcctctttatataaaaagttatttttgagagtgtttctattattaaaaatataatttttttaatagaaaaattctcaaaaatatttctaatcttatattcaaagagatccataccaaacaattctttacttgacatgagtcaagtctttatttctgagaaagccaacgaaatcatcataataaacggatacagagcgctaattttccacaaactttaagaatgtggccctacataaacatttgtccttcgttgataacaacatgcatcagtatcgttcagtctaacttagcatagccatgagcactccatcactctcaacctcaacttattctatttttaatctatgcacctttccaacacacggagtaacatccaacaactatcctcatcgcaccatttttttatattaaatataattaaaaatatatcttattaataatcatgatggttcttcatgaaaaaataaattatgtctttctctctctaataaaaccatgaactaatattaataaaattctctttaagaacttacaaaaaataagtgtaaaataaatcatttttatttatttataaatgaaaaccaattaatttatgcatcttagtttttaaataagttagatgatagagtttttaaaagaaaaaattaagtaaataagttaatttaaaatctattgtatttatctttttaccttttctcttattcataaatattgttaaagaattatctaaaactattcaaccaatatatcattaattatatattattcaagatctcaaattgaaatcttgtaaataaaaaagtgattgaaaaaggaaaccttactaacatgactaattacatcttcttctaatattacttactagcaaaatcgattaatacttcttagcaataatttggtgactccaaatatgtcatataattaattatgaataaatagaagtggatctaagttcctttagttatattttagaactttgtttgtcctaatttgtccatgttttactatataatttgacagcttaaaataatttaagatctaggatcaaaacacattgccaccttatatatccgagtctctgtcagctttagtctgtttgtataaacttttttagaaatatttataagataaaagataaaaaagaataaaatgaaatttttcttaaatttgaaaaaaagaaaattcgaagatgtgtgatttgatccagatcaaacgggttatcaatttgatgacaaatcgtgtgaccacgaacccggttggttcacaccttctggaactgattttcaaaacatggctaaaaaaaccgcttagacacgtacatgtacacactttttatatatgacttttaggacttcgttaaaggttttttgttaaaccttttaatgaggacttcgttaaagttacagcaaggagacatgtataaaaatgaacacaattgaattcaggtcggaaaaacaagacaatgcgttaaagcaatgtacctaaccaaacttttttcccactaagaaaataaaaatgataaaaaggatagttgggacacttccacttgggagcgtggcaacaatgtccaatctgttttatagtttggataactgactaatttcataagttaagacatagagttcccaaaaatggcacctaatcctatatacatcttagtggcgcttcgggacatatggcttctcttctatctccatgtcccatttttcctctccaaacttattccttctctttttttttcactatttaataattaatatctcttacacttgaaaatgtcacaaccaaaatttcctcgtagccaaagtagagaagaatcataggcaatacttcccataatttttagcatcagtcaccaataatcctgacaagaacatatgccaccatcaaaatggtgaaatctatttgaatctcgtaaaattatctgtcgattaacaatatttgatatgtatttgaaagcagtgtgacagtcaccacaaacccgaaggttcttaattatcctaataggtagctcagattggcgagtgagaacaaaagcaatcgctagtttctcactatgatagctgagaagctcttctttgttttcaagctcaagatcatagagtgcatatttggtttcaggcacatatcccaggtccctcattttgttcattatctccttgagtttatcatagattttttctttttctgggtgtgtttgatctccagccacaaacacatgaactccatccttcatggtgacccaactacacccagcttccttcttaactgctgcgttcctcattgccaacctagcctctgccacatcttcccacttcccaccagcagcatgcatgttagaaagaagcacatagttcactgcgttcagcggctctaactcaataagcatcttggcagccctacgccctagctctgtatttcggctattagctcgacaacatgctcctaaaattgttctccaaataagggcattaggattcattggcattgttttgatgaactcctccagcttcttaacattacctgcccgcccaaggaggtctaccatacaagagaagtgctctattcgaggagctagttcatatacttcacccattgatttgaaatgctcaaatccttcatcaactaaccctacatgactacaggctgataggaccccgacaaaggtaacatgatctggcaattggccatgctgtttcatttgtgtaaaaagcttaagagcttttcctccatgtccatggcgtgcataaccagaaatcattgaattccaagaatatatgttcctcacaggcatcaattcaaagaatcttgatgcataatctatctttccacattttgcatacatgtcaactagtgcactaccaacaacaacttcagattctaaacaagctcttatggcacatgcatggacttccataccacgctctaatgttgcaaccgaagcacaggcactaagaacagtagcaagcgtgaaatcatccaatctttggcccctttgcatcataagccataccaaatccatggccttatgcaggatgccattgtgtatatatccagaaatcatggcattccaactgacttcatctcttcgctcagacattctagaaaagataatctcacagtcctccatctgctcacactttccatagaaagctagaagtgtattctcaatagcattgtcatcagcgacagagtgctttaagattaaagcatgaatttgacggcccagttcaagaagagaaagagaagaaactgcagataaaatatttataaatgttactctgttgggtttccatccagcttgcatcatctccaggaaatattttatagcctgtaaaactgacgcctctgaagttgctagtgcaccaataaaagaattccaagaaacttgatcgtactctggcattagaaagaaaactttctgacattcccccatacaatcagtttcagcatataatgttagaagagcatttgaaactgaaacgtccaaatcaagcccgcatttgatcccttcaccgtgtatctgttgtcctaacatgatccaacccaaacttgcacatgaactcaaagtactaataactgagaattttgatggcaccattctatttctcctcattgtgtggtaacatgcaactgcttcctcaaatcgctcattgtggtcaaggccagagattatagagttccatgaaacagtatctttactgggtatgagttggaaaattgaccgagcattatcaatggcattgcattttgcatacatattcacaagagcatttccaatcaaaatccagacatcaaccatggcattgcgaatcagataagcatgaacctcttgaccctttctcttcccttcctttaaatttgaaaattcagtaaaagcacttaaaagaactgcataagatgatgcatttatttcaactaaatctttcatttccttgaatatcttagctgcttcttcaccctggtgctgccttgccagtccaaccattaacccattcatagtcactgcattacgatcacccatctgctcaaaaatcattttagcagaatctattaaaccataccttgcaaacccgctgaccaatgcactaccaacatacaaatcttgtacaaagctagatttttcaatcctggccagcatctgctcaagcaaagtcagtccacagtcaacccgagagcatgcaacagttactaagctacagaaggtatattcattaggcctgcagttaaattctgtagcttccctttgcatgcttaaaaatagcttaaaagcagaaattgcttctcccctacgacaatagactgaaatgatagaattccaggatgcagaagttttaatttttatttcatcaaaaacacgaagggcatcatcaatggaagctgagcaatgtgaatacatggacatgagcacattagacaacaccatgtctgaagcatacggagatttggaaattaagccatgaatctccatcccgagtttaagcttatttggaccaagctcctggcatgctcgaagagcactaccaatagcatagtggtttggtgagagaccagctgaaatgacccttctgaataacatacatgcctcatcaggcatgccattttgtgcatacccagaaaccaaacaagaccaagaaacgaggttcttttggggcatttcatcaaacagcttctgtgcggaaaccagattgccaactctgacaaatatgttgataagagtattacaccagaaaacatcactggtaagcccagttttgtagatctgcagatgaagctgatgggcatctttcacgctgcaagaatctttgtatcgattatagtccaaattcaaaggtggaaattggaggtgatggtgagatgagttgtagtaatgtagcaactgctctgacaaagctaactgggtagaacaagcatgacttgcattgtgtaacaatcgcctgtagcagagtatcatgcttttcgcaactctaactaggaaatcatttaaccgtttaatcacaggatgcttgtttacatgtaagtggagtaaaaaaaacaaaatgctgccattgcaaactcaaaattttgtaactgggaggggaacaagggttatagtgataaaagaagttatggttcgaatcttctggctgacttaacatactaattgtgaaaatttatcaataaaaataaaaaatttgtaacccctccaaattagtatagttatccttatgttcattatagatagaatagtttgatcaatatttaagtttgattattgataaaaaaaaaatatttaaattttatttatttttagtcgaattttaaattaattgttaaatcgaaggattaaaaataaaatatattataaacaacaaaactcaccttttgcatattaataaatcttacctatttaaaaaattcaaaacctatttgatatttatgaatgaaaagatacttcatttgatattataattttatataaatctaacatggactaaaataaactaatagaattaaaaaaaaaatactatataaagttaattataatctataaaaaaaaaatcactatgtctgatgataaataaataaactaagtttaaaaatatgatatgagtttatttttaatgtttaatctaactttgatgataatttatttaaaaaatctattttataataaaacttctaaagctgtatagtccatatttttaatcacctttttgttgttgttggcacgatattcttaataagtttttttcttttaaattaccatattctatatctttgaattgaatgacaataatttttgcaaaagaatttatatatctaaagtatttatttattataaattataaatataaaaaataaatatttaattgtgcaatttacaatctagaatactaaataggaagaaaaggtaaattagaataaagaagtgggtgcatggacgccaggtcattagctgggtagataagggtaggatccaagccaagagaagggaacatatgtgatgacattgcatttgcagcacacaaccatcaacatggctgccgagctcactctatcttctcccttttccttcaaaacttcatttctgccaaagtcaccatcattttccccaggttcatactcccccagaactaatgttaccgttgtcaaagttcatgctaaattaggtaacatacatgcaatcactcacttccctttgcttcagttctatgtaactattatcccatccttgtgaattaaatgaggttgagatgataaacttaggaatgtggatctgatcctattaggtggtggagatgaacaagccaagcaaggaggaaagaagaaattcataaccagagaagaagaaccacaacagtaacaattcataatttttattttttccatttccttaattttctggtcaccacgtatgtttcccaaagcctttctattgaatttgcgcaggtattggcagacagcaggagaaagggaaggagagaatcccatgaagacccctcttccttacattatcatatttggtatgtcaactccttttgtaatcttggcaattgcttttgcaaatggttggattaaggtacctgttcgatgagacagcacttcgttgtctactctactcctcgatcttcacatgttaattcacgaattttaagctctttacttctcattctcaaacttcagtagagaacttgtttactttttcacatatatgtatggacattatattatggctcgttgtaatgaactagagttcagtcctaccactatgaaagtcggattgaaaaagctacttcagagtagctgtagcagtttgataacccttgtacgtttttagattgaaaacaaaaggagaagaatcaagaacaaataaggtctttttttttttaccctgttggattcgctgcttcttgtttcaagaatagcacacgttgttgatcaatgcataatagttattttaatgaccgaacaccgaactgctaagatgagatggttgactgttacatggaaaattaacaaaggaatttagtggttcgagatttttatttctttctgctccttgtttataaaacaggaaaaagaaaaggcaaagaggtttagatcgttggtatactatagaactgcagttttttcatatttaggagaaatatatggttgacatctttatcatattaggttatttgcaatattcagacgtaatgatgtatagtgcaacagttgtacttaaaaattaaatatgaccttcgacactgagcaatctgtaacttttatagagagaaattattgcgagtaaaagtaaagaaatgtaatggtctgtggaattttaaccaatatgaaaaaaaggttagcctcatttatcagaagtagaaagtggtggaaacaagtgtactcagataacagtagtgctatgcatagtatgaacatttaggtgtcgaatttagctctctcccggggaggaattgccatttaacttctatatatctgtcccttattttaaagcatttaaatgactcttaatgtatgttcaagttcaaccatcgaaattacccatgatagaacctgggcatttgccatttggcaatgggtcggtttcagaagctgatgacatcatctgagagcacaacagagaagaggggaagaaagtcatagttcattagtgttagccattatatgctagagtaaccattggatcttcatcacagcatgtgcaataagctagcatatccaatttcaaattgtgagaccttgaaatcaacttgtcaactactacgggtatgttgcttataaaaaaacactactatgaaatgtattgtatatattgactgcggactgccagaataaaataatattcccttaagttttttacattgaaagcaatttttcatttacctattccaatcaattttctacacattagattaatgaccttaacaaatgttctcataaaggcagcttaaacgaggcaagttcaatagcaaacaaaaatcttaatgcttcatcatctttccctgcgtaaggacttgtacagttccgtagtaatatatttgtgttgaaacttataagttgatcgtagtgccccaaattgatccctatcagttttgtagatgtatagatgattcagttccaaatgcgtgggcctagggacaagacgactaccacttgcggatgaagaagcctcatgtcttattgccactggtagttgtggtggtaattctggcgggggcttgctgaactcctcttcatttaagtatgtgttatcataactcgatggtggtgatggaggatcttcaaaatcggagaagtttggaactatttctgggatataatcctgtaaaaatggtttaatcaagaagctaggtgaggctatctttgtatatatagatgaattgctcgagttgaagggattgtaagttatgaccatatttttgggatgttaattcattcaatacactattatgtaaacaaaattttctagcaatggatagaagactgttgaaatcaatctaaacaaagaaaagttacaatccattactatgaacttgcaaacttattctataagtgaggtcagagtcagagtcagaattcagaactagcattagttttttatttttttgttcagccagaactaccattaggtaaattagaaaggacacatatattcctaaatcttcccgtaagcaccgagcaattaacaaacaaggttgggacagtaacgtagaaattttctatctaccatgccatatgaaattctacttctgtgccaagcatgcagctctatagtctattctagtttagtatgagaccatccactcaggcatgatgagtttcctcatcagacaacaaattttgacaaaaaatgattcaacgtgtgactaaatggatttagtaagtactgctgaataaatattgtcaaaataaagccaaactgtcaactgaattgatgatcgtgttaaaggttatagtaaaagaaaacactggtgaagatgtaatcaacatgatcatcagcatttcctgaaaaataaactaataaagtaaaccatgaaattacctgcaaatccaatatattgtagccataacctgaatcatcagaagccgatgggaactctggagcatgtgtcaagtagccatctacaatgaaacggtaatgatagatacctatcgggagtgttttaacaatgacaaaattttgatctactctcatcagaggctccctgacaggacaaggtaaaaagttcatcatatcataagatgaagtaagagcaagaactatagttggaatttaaaattgtgtagattgttacgtggtctcccagctatcccatgatcctgcaatagcaacattcgtggctgcatggttccatgtgatcctcacacttttcagcctttcatgaatcacagattctacatatccattttgtggcaggggttgcgctaccgctgctggtctttgcatttgcatggcagccacagggaccttgaaaacaggcattttaaatttgatgttttaacgtaaacgttcattgtgttgtgccgctcaagatatttactgtcaaagtagcttcattcaatggcactaactattaacttgtacattcttcatcagattaaaagcattaaatccttattgtaattgcttaaatttttatatatattacctgggagtgaactaatgttgcaataacatgcatgtattaagtctcattataaatttcttcggccaatacatctcataacaattccctataggaccagcagtgtttcccatatgaatgataaacaaaattagtattcaaaatattaaatccaccttaaaattctaaaacttgaaagattactttgatctatgccctataacctaaaatctgattttagttgtaccatcccaattccacaaatcactattaaacggtaaaagcagtctagagaaggctgagaagcatcccaatttgataggatgcttatttcttactgctttgatcaaatttctttctttcccctcatggatacactgtataaaactataacattaaacacgacctgtcctatttatttttttcaataaaagacattaacaaaggatcatctaactctgacctggggttgtatgagcaagggaggtggtggctcatatggtccagggccatgtgaaggtaactgaaccaatggatctgtgaatccattagtattgccataaagcacttcaggtggcagaaatttgatgtcttgttcgtactcatcctttttaactccagaagtgccttcaccatcctttcctctgctgttactacccatcactgaaagtggaagaaacccagattttgatcgcacagcacgaatccattagatagagaagaaagaatcagaaagcaatatggcatatccatttcagtgcataaatagaagaaacccttgaaagcaaaccaggaattgactctaggtagaagagtggcattgttgttatagaaaaaaaaaatagtttttttttgctttattttaatatttgatgagcctctcactctctttctctctctgaggatgccacttttccctgccttaaagcaactgaacaagcaagtatacagggttttattctccaatgaatttggaagattccgctgtggactaattattatgagtctggtttaaaggagaatgttcccctgctatcaggaacaaccaaacactgtctaatgaaacagtgcatactttttgcacagtttcttgtccctgtgccggtccattaaattaaattaattaaatttctgtttgtaaagcaaagcaatctaacactacagaatattggttcggtaccataatggattacaccagctaaacgaacttgttttcagcgtaatggtattgaagtcaaaagctcgtaacttgctacttgttactattattgtcaactaaactcataaaatggcatcttctaaaaaaataaagaaaaaagaaaatcataaaatagcatccattgttttgtgcttcctgtctatacaggaaaacatgagttgttggattggatttgacatgttagctttgtcttttttctattttgtttgcaacttcttgtcttgcataataaaggttaatcatttcaatactagtgcacttcttttgccaatgacaagagtactgcacatcgacaacccatcccatgaatagaaaaataaaagcctgctccgtcctcttggttgaagtttgatggttcaatttcacgatatactagaaaacaatatgacactaaatcaatagtttatgaaaatataatattaaatcaataatttctatttcaaccctattgtcaatttagtataatatacatattccttgtgaggaataaattattttttgttgcaaaggatatagagaaagggatcggtacctgtgagccaaccactgtatttcatattcatgtttgtatgttgtgattatttttatttagttacaagtaatgggtaatcagctgttttatatcatatagtacatcgtatcggataaacaatgcataaagagggctttcttgtattagaattcactaggactaggctcttgttatcgaatccaacgacggttttatctttttctaatgcgtctgctcccttgaaacgaacaagaaattgcgccatcatggctttatgttagagcactctttctgcagggatgttacaatacacttcattggaaattggccccttgaaccatttttttccgtctacaatttcatagctgtaccaaataattatattatagtcgcttcaatcctcaaatagatgtagacctattggctataacctataagggaaaaatcatgtatgtaaagtgaatgagtaaaattaattatatttatttttaagattatttaatacgtacgtcaaaatcatgatggattattaaattaaggattatttcactcttaatcgttttaagcaaaaactcactttcaaggggcattttctaatgtataataataatgaaaattaaccaagggctttcattttctacccttctcctgttctcctatagggttattaacattgatgcatcctataaagtatatatgcttagtgaaagggtgccaaacccaaataaattctccagggacaaaaagtagatacatacggatcttttccattatatagctgcttttggaatttaagatgcaaccatagcatcccaagattccaaagttcaaacaaccatgtgaaaagctaagtaaaagcatcaatagattcttgtttaggccttttgaagttatacaagtagctcctgcgtgcccttcatcaattccacccaactttagcaaggcctctatgtccaagtccccaaagtatctaccttcccatgtggtttgttttatatttccaaaaggagtcagcataataggtactagttgagcatgtcttaatccactaaagctcgtgagagcaaattatggaggaagtgggcatctccttttaagcatccaatcaatgataacaagctcaaagtaaaacagatggtagcatactttaatagtttcacagttacttgctaggtgtcaactaaacattacataataatctaacaaggatcattatcttcaaagtttacagttttttttttttttaaaacaggtggaaaggtttgtaaaatttgttacttcatagttattactatatgctagcatagatttggtagttgtttgatgcatgatggacaatcatatgttctgtggtttgattcagaccccatttccttcataaagctaatcaactagatattcctccattcccacatgttcgtcaccaaccactgaataattaattaatcgagcaacaactctacgagtgaattaatatttgaacattcattttaataaaattgggagctccgtcaaatttgtgtagtggaagttataaaaatcctttctcaatcttcgttattttcatgaaatttctcacctataaaaaatttaatataaacaaggtgtttatgtttgattgagtaaatttaggatgaaaagaaaatgaaaaaataagccaattttctatgacaagaaaaaataaaaggaaaataaatgagtctcaaaaattgaaaaaatgctcaatcaatcaatcatgttgttgctccatccagtgtaacatgcttgtaataaaatatgaaatgatatgaaaaaatcttcaccaataagtcataaatcaatcacataaataaattggacatcacatctaactcaaagttttaaaacattagatatataaattcttattacttgtacgttgttcaacatactaatcacgttaacatgacttgtattaagaaatgaacatatttgttgctcttagatattgcatcaaaccaattgtcaaagggattaatggagaattatacctatgttcatgttaaagaacacactcattgaggagttataaagtcagttaagaactcaagaaatccaataaggtgtactatgcatggcttgtcatgatcaaggaaaatcacacctatttatagaatatttcttctaatcgtcttgtaatggttcttgcccttttttagggatgacatgtattagtgaaaggaaggaggtgtttattgtgccttaatcatgtaaaggtgaaactaatttagggatgacatgtattacttgattatgtattagagttaggtccatcaaaggacatatttgtgactatgactaaacctttatctttatcattctaatttatagtttgtaaacatttattatttattattagatcaaatggttttttttaataatttcatctgaaaatctattattcttcatcaaccgttaaacttaaaagacatagatgcttgttagtcttaatccatgatactatttatttctctcaataaaatagaagaatcatattttgttatgaagtttattaattgggcttgtgacgcatactcagtaaggggggaaacgccaaaacatcattatcttgccttatggaataagcaacttaaatagttgtctgcttcttggcaaagttgtgaaaatttattttattttatattctctctttttaggttaatttattgttaaagtcttctacgggcatttgcattgtaagcaaaaatgtcaagagagtgactttgaaataaaatatgattttgtaatttacacaataagatcggtcaaataaagaagcatgatagccaaaaggccaaaataacaaatttgaactaagcaaatgataaacaagcaagttgctgcctgaatagttgtttatatatatatatatatatggcttaattattagtccttgaatttgaggtgtgtaattttttagtctttgaaatttaaaaactattttttttaatccctaaattttgaaaattacatttttttaagtcccttacataataaattgacactttataatgatttttagttgttttaaattaatttttatttttgattaatttgaatttgcatttaaaaactatcataaagtgttaaaaaaatttgtcataaagtacttaaaaattatcacaaaatatcaatttattatgtcagaactataaaaagtaatttttcaaaattcagtgattaaaaaaatatttttaaatttcaagaacaaaaaaattacacaccaaactcaaagatatataaatataaatatagtatgaataatatgagaatactcttatataatcataaaaggaatttttataaacatgtgaacaacgaatttaagattaaaaatagttagttaagatgaaagtatttataaattcaaattaaaatttaatataatcataaaatctttaaaagattttttttttaaaaatcaaacctataagtttgttataaaattcttttaataatgggtcttagttgaatgctaacacagtgattgaaaatttggaaaatttacattgtatttagggattcacatctcaactacaatacaaattaaacaagatcgtatataggttattatatatatttttaaagccaacattttttattttattataatcatgtctcagttttagcacaagaagtgccatacacgaagccaaaaatctgctcacaacagaatacctcacctctttcgaaaaggcaatacatagagacatcctcccgaaaatgaaatatgctacaaagccacaaacatctatttttcctccatttacaaaaaatataatctaaacgagactatgctccccccaacacaacaaaagatatccatcgtatttttacatctaacttttctttcattgtatttctatctcatttttatatttctttattatttttaatcatatttgtcacgtcaatcatttctctctctctctctcacttatacattccaaaaatggaatatacattaaacttttacacacacacaaatatatcaaacaaaactcttcttactatacaaaataagaactataaatacagattatcaaatcatatttcaattttaaagttttaaaaaaatatctatacgactttttaaaatgattatgtgtgatcaccaactatttttttaataatcaataattaattgtatcatatttaatttgtttttcatataaatgtattttttatttgttcttagattatttcaaaatggacataattatgaatattttgaatgaaacttgatgtttctatatttattggatgaactttaatttttatgattagctttcttatcatctatttcatgacatatcacacataaataaagttgaattttttgttgttgttagaattaatgttacttgaagatttgaactcatgattttttttactattttcccttcaatctttaaatcatttttttcaacatcaaatcaacattataactctttttaaagttgaactttttccctaacttcgataataccataggcataaaacattattatgtaattaactttagaagtatggtcacgaattatcatcttcttagcaaggaatgttaaggtttgaattttgatccattttgtagaaacatgcacgattcgtttatcaccatacgtcacttaattggtaactttgaattttctcaatccttcgaatgccagctttcatactacaaataaaaaggatattgacgcataagctttggattcaaagcaaggatgttctataagctccgtggttagaataaaacaggtaataaacattataatatggtatgttaaacatttttcaaatgaaattcatgattagtggcaaaacatcccctatttccatccctcttcatgacaatagagtagtcgaattttctttcttgtgtttctttttcaagaataaagttatattctcaaatcccaaaaataaagtatttataaaattgtgtcacacgtggtcttatttctataaataaaggatcaatggtaaatgatttttttattataaaggacaatgactacatcaatcatatttgtataaatgagagattaacaagaaaatttgtttttaagggatcgaaagtatatttaatttattttacttgcaaagattaaaaacatttaattttttttatagtaacatatttaactttaattaattaattagagagtttaagagtgagaattttgataatgtgttataaaacattcacttttttacgcaaatgactatatgtacaaatggtttgcaaggggcatcattaagttgttgctttataacccaaatagcttgaacttgagtagccagcccattgaagcctggacccggtttatgattctccttctttaatattaactgggcctagtaaatcatggatctagagtaccaaaatagcaccttttaaatatgtgcttgtttggacccaaaacataaaaaaccgtaccttgcccttgctcctccatatctatgctgtgacaaatattcatatgtcctcatctcgaattctcacacagaacttcgaaccttgccctaaatagaaacgtacttgaattccacattatattttctggtatcagcatactaactagaggggaatggaggtacatctagttgtcatcttataaacataactgattcatttttttcccctttgggtccataattacctgattttagacaacttattgcatcaattcataaacctatgctagtgggatacctattatatatcaaaccaactttgctttaacttgcttcattgtagaagctagatctagcatacaagtttcttatgtattttgtagctggcttgttccgttcaaactttcttaaatcttgagcatcaccttatctcttttggctgacattgttgcagttaattttaactttgtttacttatcctaaaaccaaaaacaaagaaacgaatcaaatgtccttgggtagcttttataactttcttttgagtaagacactgtttactccgttcttaattgagcaacaaccttactgttaaatattgaaacagtacaactattggttgccccacaatgatgctatttgatgctttttattccaaatttggtggctcggcctttaattattgcaaggatgagggtgacaactatgtatcaaccaatgtaaaacataaatttatttgtcacgaacaatgatggagcccttttcactaggaaaaataaaatgcttgaactggtttattggaatattgagccaaattgtcccaactggcaaaagattttggtctttataaatgattttgccaccaataataatttcaacgtgttctccagaggactgccgtcattaatattacgcaaaacacaatttaaaacatagatatacattagataggggctcctgcacacttgcacatattatacatttttcccaattatctggctcgcattacagtaccctatctaaggatgatgattaaatttaatacacatctataaaaattgtctataatggataatatttttacctattcatgtaggttttaatctagatatgataaattttttttgctgactttattcacagaatttttgtagataagtaagtgtatgagtacaataatacttttttttaatagtacattaatactataataactgaatcacttcatgtatatactcatattttttttaatcatataattagtgcgaagtatgcaagtatatatacatatatattataattaggatttaaaatattttatatatttttaattaagttagatgttatactatttattattatttttgttttattaattacatataatttttctaaaaaagtcatataatttttaatatttattttatttatttgtcaaaaaataaatattttttttattgagaatgaacaccgacactaaaattattacctttacaaatataaactaaagtacggatttttatttttaaaaatacaagtgtaaatcactcgtcttgaatccttctcggttattgttcaaaatgtatgtattatacgagatattttaaaatgaaatgaccttttgagagaatttaagtcaaaattcttactaaaaaatacatttcactcagcagctagccgaaaatcaaatgttatattaaattaaaatttatgatcatactatattataaaataaccacgttgaaggatcaaaagaaaactattatgttttttttactaaaaaaagttgtttttgctgcttatctttgaacaactttattaaagtcccacgtaatgaatcataaattaatgctaaatgaacataaaatttattcgttaaactaaaactacaaataatctcttaattaaacaaaataacataaaatttattatattatgaacaattaaaacactatttcatgaaatatattttctttttatttgatattttttagttttttaatctgaaagtatgtaataaatattttttttcataaaaaataattaattaataacattataattttatttcatttcactttatgctatattttattctatttatttccacattttattaaaaacatatgcaaacatgattgtagatttgctagtgcgatgataaaatttgattttgcccattttggatttacgtaaattaatagtatttggtgttttttttattgagaaaaatttcaacgtcaagaatgctttcagcaaattaaatctcaaaggtacaggacagtgtgatatttgtcgtcatcgttaacaaacgttttgtaacattttttttaatacgcttttctatcatcaaataaaaattataaaattttatagatttcgcttcttactcaatattttaaatttattaaatactccttaatatgtatatgttaaccttgaacactaacacttttagatcgaaaatagtaccagagagcgagcatccaaattccaaactcctcttataattttaagtttaattttttttcttgcaattcagttttttagtttttttttccttataactttttttaaagaataaaaaataaaataaacataatttataagaactaaaaattaaaaaaataatttataaaaataaaaaattctaaattatcaaaattaaaaatatatttaaattataattttatttaatacaaacaaatattggcaactgtacttaaaagaggaaataaaaatcgtgaaactgacatgtacattagtggggagtggggcctaagagcgtcggtgggatgcggatgcccaattgctcaattagcccactttgccctttaatactatctcatctcatattccagaaagagtatataatactatctcatacactgttttatacaatactttttacttacttatttattatatctcatattcctctttcttaattatataatttacaatttcatatttctctcttaattgtataatttatcacaagagtactatttttcttcaaaagaattactatttttataccactcttcaaaaagttattaaatactactaattcaaaactttatgtatccatgattctttctaatcttcacatttcattttgtcggaagtattagttgatttggttgatgattaacttttatccaagaaatttgaacaactaattttaatgaaaatgttttctctcaattacatcaaaaaaatgtatttatagattgtttattaacaaaaaattctcatattgatatatggatatgattcttaccgaatgaactaactttgttggttctaattattaattttcttctaaattaaaaactcaaacacgtattataatataaatattataaaaaagtggggccaattaaattagttatcttaatagaattgtcaaaataatggaggatggggtccatctcgaagccaatcccaagctggcattaatagtatgccttctcctcataaacggacatgctgctttagttataaacccacacactcctctcttctccattctccactctccctctctctttctttccctaatcctccaaacaaaatgaagaacctcttctctctcttcctcttcctcttcttagcctcctccgccgtcgccaccgtccccgcccacaacatcacgcacatgctggccaaacaccccggcttctccaccttcaaccactacctctccctcacccacctggccgaagagatcaaccgccgccagaccatcaccgtcctggccctcgacaatgccgccatgtcctccctcctcgacaagcacctctccctccccaccatcaaaaacgtcctctctctccacatcctcgtcgactacttcggcgccaaaaagctccaccagatcaacaacagcaccaccctcgtctcctccatgttccaggctaccggctccgcctccggcaccgccggctacgtcaacatcaccaacctcaaggccggcaaggtcggcttcgccgccgaagacaacgacggctccctccactccttctacgtcaaatccgtccaggaaatgccctactacatctccgtcctccaaatcagcgcccccattagctccgccgacgccgaggcccccaccgccgccccctcggacatcgacctgatctccattatgtccaaacaaggctgcaaggccttcgcggaccttctaagaggctccaaagcccttccatctttcaaggaaaacgttgacggcggcttaacggttttctgccccaccgacagcgccgtcagcggtttcgcgccaaagtacaagaacctcaccgaagcacagaaggtttcacttctgttataccacgcgactcccgtttacgagtccctgcagatgctcaagtccagcaacggcatcatgaacactctggccaccgagggagcgaacaagtacgacttcacggtgcagagtgaaggagaagacgtgaacctgaagaccaaagtcaacacggccagcatagtggggacattgatagatcaagatcccttcgtggcttataagataaacagggtcttgatgcccagagagctattcaagcccagcgatgccaaagaccaagaccaagcacctgccgagtcgcctaagcctgccaagaagaagaagaacgctaagaagggggccgccgattccgatgcggcggatgcaccggcggacggaccatcggatgattcccaagatcagaaggctgccgatgaagacagcaatggagtaagcggattgcacgtgagattcctcatggtcttcttcggtttaattatgggctttttggctctatgaaacacccatacatatggattatggagtgtcggtactatacacttgtggtcaaccatcattgcaattaagattcttttctttctttaatatatgtgaaggaaataaaacgctgccaccgacacatgtaggaggccatgtgtacttctttctttctttttttttttaatctgttagtattataggttttgtatttattgtttgtttgttttccgaattatttaattggcctttttttccagtgtgggtagatccggtttgtgctacctgccagctatgggatgtgtgcatataaacagttttcaattcattagattttgatatcaatattcgcccctcatgttttctttattattgttattatgctacttgtcttaatttccgcggtcacccaattagtagttcataataatctatgtttttcggacaccattaatatattttaattttctaagacattaagctcggattttgtactgtaatacgacattggcttaaggtttgaacttgctactgcttatgagttacttaaatcatcttcaatcggatttttcaagtgaataagatatgtatctcaaaaataatatattttctctattataacaagtccatgtgataatgaaaatagatatgtattttttataagaaattattttttaataataaaaaataatatttatctgacccataataatgttataattaaaccataattaaataaaatataaaaatatgaattttttaaaattttctagaatttctcatcattaaagaaaaattatttataactttttttataatgatatgacactttgaaaataaaaaaaaaataatataaaaattataaaaataacttaaaaaattctcattaaatatcctcttatcatcttatcactatttcagttctagtagcaacttgaattaagagaagcttatatagcgaggtaaccttttttttgctgtaatttaattaaatttcttacagtttcctttttatttaaatgtttaacggcattttcctctaactgaatgatagaattttaaaaatatggcccacccatcgatcaaacttgtaccttatactgattatgcagtggcagagcattttaatcccaaggagatattgttttccaaaagtgataaaagaaattgaaaaatcaaggtttaaaaattttagtcgcaatatcataattttggaggctttctaaacagcaattattgcggtagctgctcaagttgtcctcaattttttattttttagttttgataatcataacgtaatttcaaatccgataccgatagcatccacaatttaaaactgaaatgaaaataaaaaatcagaaattatcagagtcctgaaccaaaccagtacatgatgtatggtcctgatcaaatcactatatgagactaatcagtattattaatcaagctaaatattggacacttaggccaagcccatttcatatttatatcaaattggttttgatccactaatgttaagatttaaagcttcttctacagagaatttgacaaaatagaactgagtttcgaaaagttgacaaaaaaaatatttatgcgtgttaggggggtgagaaggatgaaggatctcccattaactttgcagctgagtgtcatatttcttgacattaagtgagtcattaaagtaattgcatagacaaagattatacaaatttgcaaagaacagaacataatcagcggtgaatcggtgatggctaaagattggaagaaactttgtactagtgtgtattttagagaaactcggttagtgctagtgcgacgtcttccttcccagtatccatgtattgaattgaatgtaacctttggctcgagtcctaatcggttctgtataggagatctgtagctgctttattagctactttattacattccacaacggatagtgtaaaccgatatccgttatatgcagatacaaatttacttcagcaccatcactagtcttttcacctgtcttcattttttaacattcatggatatctatgggtattcgctggtatacaaaaatccacaggtagttgaattcgaggatatgcgtgaattcacgggacgggtacggacagattttctaactcgcggagcatgtaacacgtgcccctatctagtggtcaattcacaacaaccaaagtatttgacttgttcattacataatttttgcggtgaacaaagggagcaaagttcaatgtgctgcagagggtgaatacatcctcgttgccaagaattcttttcaccctcaagattacaattttctataagcaaaaccaggatggagctgtatagccggaaatattgcagatatgagaaagaaaacgttgccaagaattgcgaatgggaactttgaactatagtttcacttatatagtatttataaaagagaccatcactgcaatgtgcctacaattttcaagtctcggaaccgaaccattttaaagtaactcagtctggtgtctgcagctgccaaatcagcgctataaacacgggatcaagatcccctgcagttttttcttttccaactgcatgaatctcaattctcaatcattaatatatatttctacttgaataaaattttgatagaaaaacataattaaaaaagaatggattgtgaaagattgaactgcaccactgcacggatgttactgcatgacctacagttacttattaaatgctgagaatcctagtccatctcttctgaacctgagactttcggatgaaaccgtacaaaacaccagaaaaaaaatcctcgtactaacagaagtgcatgttctttttagcatcttattctactagcctacacttattttccacctcaaaaatttctgatccaagattaggggtcccagatttcaaaaacaactttcttatatgacatcatccccattaaaaaaaatgccgtatatgttcaacttaatattttggctttagctctcggctctaagaagtgaattagaaaatcggcagtcctctacacaataatagatgacattataaaattaacaaacagtagaatggcaccatattttatccttattgaagacataaaattcaggttccggatgcacctggaaaaagtactaacaaataaagttacgtatacagcttgaagtaagtactattaacaaataaagtttgagtatgatatataaatacctctatatatcaaacattttattaacatctattatttcagtctatttttctctttttatcacaaagtattatatatactttatctgtcttttctctctttatctatctaggatctaggtgtctactagagtttgctgtccacaaatgttgttccacaaagtttacaagtatatgtaacggcaacttgcaagcatatacatgtcaatcttgctcctgtttggaagctaacaaaaggctggcatcccggttgttaaaatacagatgggtctttttgccagaagatgtacaagtaagcacgttagaaaaaccggtgtagttgccatccagctttgaaatgcatatttttctaataaagtcaaaaagctcattttcttgcacaaaaggctgggcagcataatcttcaactggcatccactgaatgaaaaaaacgagacaccagttaaataattacagaaattacaaagtttcctggtaccaatgtcttgatagattatcagcatgtagccttcattgacttggagagatttaaaatgaagtatgaacttaagcaacattttagggtgcgtttggtttgttatttattttcattttaggagtaattaataattaacagagtgaaaggtgaaaataatatggtatttctttagttatacttaaagacatgtcaactgaaaattagtgagattctcaattgacattagaatatataccttcgctgcctcaatttctgaagcctgattctgaatgtcaaacgattgaggttgcaacatgcaaacaaagaacaaatctgatttctcgaagaacgacttatggctttgcctagtacaaaagaaataaaggtcggtgaacgtgaaggccacattcaatattaattcagatttcagagagaaaaatagtgtaaattatatgcatagcagtatgttggttatttgtggaaaaaaacgcattcacaccacatattacctgaatgctaaaacttcaacaaactttgtttctatctgaaaaaagaatgaaagtaatggcattagactttgaaacaatccaaaaaacatgtaatatataagctatagataaaattacaaccaagtttgtcaaaacagcaaacccaaaacttggtcgatattagttgaataatttgaattaaaatttactaagtaatattatttaattttaaatatttatattgtcacatgcataaaaatatagtgtaattatgaaatttcaagatttcagaggagtttaaggtttgtaaggaataaattctgagaaaaattaagaaaatccatttttttttttttgacaaaacagagaagcataggcctttatttttggggtcaaattggaatcagtctttgattataagcaaaagagcaagggaacataataaaaaaaaggaagggtcttaatcgtatattagatatttactaaagcatgataattgataaaatattaaatacacatgaatgccagtttttatgatattcattaaattattttatttttacatttaaaaattaagtttgtaaggaaaataataaaattttaaaaaatgttgtatataaatcttactgatattgttttttttttcttaaaaaaatacataacagtgttagctaaataattagtgacagagaaaaatataaagtggattgtaaattatagttgagttcggggtttgctattattttgacaaatttcaagtggaatgtaatttactctaaactataaattatgtgtttgcttgcttacccccgtctcttctttgacttctctaattgcagcttcacagagatcttcaccctgcaagtggatttgaaacatatcaaaagataattttagaagtttaataatttggtcggtaataattttgacatactttctgtccaaaaataataataataattttgacatacttcattaacagctcctgttggcatcttccatacacctgtgcctctgaatttgccacctgtttcctgaaccacaagcacctgtcaaatgaaacaagatcatttcaaaggtttcctcctttattcaggcttcaaagcttggacttcaaattgaaaaagaaataaagaaaagattacctctttgttattgttgatgacaaaagcaccaacaccgacacgatgtgaagcatttgcaggaatggtatgaggagtatctggaatccaacggaccagcatcaagtaatctggctcagcatggtggtacctaaatccagcctgaaaaaggagcacaaaatttgtagcaaaatggcttcttaattaagagttaggcttaggcaaataaatgataataaaatgtatgtttaccttgactgcaggatcaacaagatttgaatgttgtatgggcaacttgatccagacccccttcttgccctgttggctccacttgtagattgaagcttgcaatatagaagagaagagcgtagaatccatagggtcttggacgtctacaacgactcctccatgatgatcctcaactccactgagcaattcaatcttttcaccttccatttggttgtgtagctcttctcttgtaatatatatatatatatatatatttgcagacaatgaggggatgagatgagatgataggaacaaacaacgtatatataattaattttggagaatggatggaaggaaggaaggtatgtaaactgaaaatcaaaggtagtgatgaggaaatttcattttggtggttttcttttcttgaccctttactttcccattcaacatttctaatacggagacaggtgaatcaccgtcccatttttccatgagcacggcggtgtcattgacctgttgcggctcaaagtacagccaagccgtcgaggaagtcatcaattattcaattacttccataattgtttttttctacggactctaaattaaataataataaagatttaagaatgaccttttcttctacaatgtttttctcctttaattcttcttaatttctctgttcttgtgtgcttgtttttctaaaagttaaattactttctaagttcctaaattatttagcaatttaaaattaagttcttgaattattttcttaattaggagatgaaaaattaataatatgaacttaattaaaaaaagtcaaaaatctagtttagttaattaagtagaatgtataagttattataaaccttttaatatgtattcaattctcacatattaaaactcaaagatgttttgttttttttttttatatatagatcttcaaatatacttagctgataatatttggaagcataatttaatcaattctaaaaatcttttaagagaaaatatataaacatataatattaaaatgaattatgtatttaaatttgaggggttttacaataaaggatttccctatagttaaccattaaattaaaaagaagtaaattacattaattatttttgagattttatgaaattatacaattttttatatgtttttaacatttataataatctcaattttcttatgtataggaacaagatgtaatattttttaaataattaaaagaatctaagtaacgtataaggggacgtcaacgtaaacttttaaaaataattaaggggttagtataaggattaaaaaataagaggatctgtgtaactttacaaaatcttaggcgtgttgcgtgtaatgtaatttattcattgaagaatcaaaggttaaacttgtgatattataaataagtgtatttgtgaagttatgaaaatactaacagttcattttaatataattagtagatgctatagataattatgaaaaacccttatataatagaaagagaaaaaaaatactaacaagtattttaatagtaattaaggagttaaagttagaaaaaattacaaaaaaatacattatttaatgttagcagcaatttattttcataataattttcaaaacaatgtctttctgtttattagtttcaattgaatacttggtagcaagactttaaaaaagttaaaagcgattagacaaaaaattcaattaaaaataaatataattttaaggatccaattgaaaaaaaaaaattagaacctaattaaaaattgttaaatagttaaagagcctatagaataattgaacgtaattaaaattcatacggcctattaaacaaagtgagttattctctatttaatttaatgaatcttaaacctcaatttaattaaaaattacttaacttataactaataataaagttaaaagtaatatataaaaatgtaatgctggattcctcttgataaaacttagtttttgtatccaatagaataatattttgctattaaacaaaaattgtaaattgtaaacttacgtgtttttgtgttgctcgtgctgctttgcagtatttcaaacagcccaaatggcatgtttgtaacatcaatagctaaactaaggttaaatgaacaagaaaacttgaaaagtaaacagcattgaaaattgacatcaacataaaagcatgatctctgaaacgctaattattttagccagaaatccatcattatcatcttttccagctttttatagtatattattctattttcgtttaaagttgtaccttgatggcagcgcctagagcatccaacaaatttccatctgaactaacaacaagcccatcaatgtaaggatcccaacaaatttttccttcaacgagaataagcgaggagaggtcaattccagcacctgaggggaaaaaaacaagagctcaacagctatattaaaaagaggcaacaacatggaagggaaagcatatggtagtaagcataatcttcactctaggagaaaatagacctgctccacttttaaaactatttaaagcaaaaagtaaaaaaaataatgtctgccagggtttaataatcagaataccctgccaaatgtcaactgattaaagcctagcccggggaataacttcagtttcaacagagattagttgatatgtcaatctctttctaccatcacaacgaagatcttgaggaatgaaatgtttttctcaaagagataaacccaccattcctgcaaaagtaagatttttttctctgagaaatttcataactaaaaagtacaaagcggaacagtcaagtaaagtgttgttaaaccaggatagcagtgtaccaccctgttacagtctaagtagtaagtatatactttctgattatccatgttatgcttgcaggagggtcttagtaataaagttaaatcctttctcaattgaaaattcttattacttatgtacaccttagtagcatgcatcccttcatttggaaccatatactctaataaagtgatttcccaacctgcctatgagttaccacacaacagaaagtcattaacttgaaaataaggaaaccaatcctaactcaggtatctcaaatgcttgtcatcattatctatttcttccactgatttctcgaacacagtcactttctatatacaggagattaaaaaaataaacttaaagtcaagtgttctagcagctactttttacacaaagaattaggattattagacaaaacacaaataattggtctcagaacttaaattaaaaaggcaggccccatatctggagcactagcatgccatatcacaagcactcataatagagaagagagaatttacaattacaggacctgatttttcttctaaacttcaatttgaaatcaaaatacctgaaaccaatcatgataatatttacaaagcatttgaagacctaaatggcattcctaagtctaaacacaataaggagttggcgaaactacatcagataaaaaaggaacaaagagaaaactcctagaaaagaataattactaataacagcaagcattcacaatcacaggcgtataaagaaaggcataaaaataaaagaaccatttagctagcatattaatggcatagatagaagatggaaatctgaaattgttatgaacctgaattggtgaaattagaaagtgaatgatagttagattactagtttcataaaattggattatgagtttgactagaaaatattcttagaatttgaacggaatgaatttactctttccagtgactttgaattttgaagcacacaatgcatgagaggagaggtttgaagctgataatgggctccacaaacctaaagacatagcagcgtgtttcaggtttcggagtctgacagggaaatccaaaaaaaaaaaaaaaaatactcgttctgtcaaaaatactcgtttattaaaaatcatctattttaattttagtgggttacacttatcattgattctttctcatagattctttcttttgatttagacatgagatctaccaaaattaataattttaaaaaatattagtcgatcacaaagagtatgtcatagataatatttttaactttcttcttttaattttgttgtggtgttgtttgaaattgaatgaatggaaattgttctctattaatttagctatcaatttccgcggttgagcttgagccttcggtgatgttagttaaagttagctttaaatgattatatgaatataaattattagaaattgagtgagggatatggtgagtgtaatctgcaagggaaaattttctttttttccccagttgctgaaagtaaggaccgaggtagtaggagatatttgcttcgtaatgttctgttggaatgcatcaatacgtgagtgactacattgcttggtaaatggtaattgagaaatcgtgatgccgatagtgcattggatttggagtggaagctttgaataaggaatgcgttcgtggggccatgtctttgaaataaattgctgataatatagatttcttatttataagatataattctaaaaggaaaaaaaatcaaggtaaacatatttttatcatacacgttttaagtattgatttttagacttttataagtattttatttatttatttaagtgatattgaaagcttaaaagaaattgtatctatcattgttgaaaatgactttttttttttttaaaaagtaatgcttgtgttctataatatataaatatatttatgttctgttgtataaatatatttatacaaaaatacttttacatttatgataataatttaacaaaatatacaaactttcatgttgttgatataaaaaagaagaaagtggaaagaaaaagatttcacaaaaatgaagctttgtaccgtgggaaaataataaataattattctaggagtgagacacataaaagattcatatgatatcattttaatatttaaaagactaatttgatagtaattttgaatttgaaaagaataatagcgtggcatagttaggttaacagttagaagaataaattgaaggtttgtcatttatgacatttgtggcttagacataaattgaaggcaattagtgattaatggcaaacggtgaaaaactacaagagatagaagagccttacacgcaccgtgttgtggcctctttccgttttttgtcgttaacaccgaaactgaagcaaaagtcagttacttgcactgtttcatttaaaacttacaagcaacaacatccttgtacctctttcattcttactatgcctttggccgcgtatgtataatataacaacattttttccttctggttgttggtactaggcaaatgataaaaaaatctcagtgtaagtatgctagtaattggaaaggtttgctgaatctgtattcgctcaagtaaagaggcaacaggtacaataattttgattccatgctaaatctgttcaattttcatgcaagttgctcaactaattaatttgttcaagaccaaatgaatattcgttgttgtaaattactatattgagtttatacaatattgttgttgtctctcgtgtttaatacgactactaattgcttctggtcatttcatattcattcaatgaaatagctgatatcaaacactaagtatggttggcagtatcttttgtttgattttactttttttatgcctgatataatatgtgacaagttctctgtaatagaatccatcatttttttgcttgattggttaatttgtcatgatgcatattccccattagcaacatttttctttcttcgaaaccgtcaaaatcatgcttcaccaagttcaactgtagtatatgatgaggctaccatcttgctgctggttccattttaggtatcagagttttggatgacccgctttctttttcttctccctctgttttctttttaaacactttataatctaattggtttcaccttaacataatgtgctgaatctgcatgtgggctaattccaaacatctcgtacttcaagttctattccttctgtgcaaaaacaaaattggtggggggaattgtatttttttaattaaaactacctttgtcgactagtcacgaggtaaaatcaagtcaaaataaaaaaaatatacgcgttttagatgagcactataattcaagcttctgaaatttctaactgtagcacaagtaatttaggagatataaggttaatctagtggttggggaaggatgaagggagaagagagggaggagagatcgcgggtataaatctctcaattaacatttctaacaaaactaacaaattaacattcgccgataaaaaaatatcaagtacacaaatatctgatcttgttggtgttcggcatgtgctatctctttttcttaccgtttatccttgtgtttctttttaaggtgacttcatctcatcttagacaacagaaacaatggcaatgcagggttgttattgtcactatacgaagttggcaactcaaagaagaacactggacaatctcagtttttcaggctcaatttcggttaacaaattgtcaaagaatgaaaggaccagaacatgtgatccattatcatcagggaacaatcaattttataggttaccggtgaaaatgcgacagacagaaatgcctgcctcaaagtatggaacaaatggtaaagctgttagaatggtagggacaaatgagttagtgaaaagaaagagaatgttagagaataaggtggtgaatggttcagcaacttcaaaggaagtgagaaaaaatggtatcccaggcttgaccaagacagtgaaatctagaaggtcattggaagagctaaaggttttagccacagatgaaggtttcagttgggccaatgaaaattacagttcctggcagaggtctattgatgtttggtcttttgtggcttctttacgtattcggattctgttggacaatgcaaaatggacatatttcggaggtttcacagaggcaaagcaggtaggttctcaaggttcggttcttttcttgctaaatttaaaatactagtattttccatttatttaaattggccatgtttctttttgctgacctgaatttttttaatatttttatttagaaaagcagaaggcggaaaactgcctcatggttaaggaagtgtatattgcagcttggtccaactttcattaaacttggtcagttatcatcaacaaggtcagatctatttccacgtcaatttgtggatgagctcgcaaaattgcaggtatctctgtagattttgtttttctcattttcagactcatcattgtagatttgtagagattcccccttttttttgttttttttttttttaaagaagacgaagaaaggtgcttaattttgtcatctattctacttatctcattcaaaaaaaattctcttagactatcctttattaaaattcgatataagaaattattgaaaataaaattttaattaaataaaacttattctgaaaataacttcgttaaataaaatgaattaagatttgcttgtatttttaatcaatatacatgagggtttttttccctatattcaagaccagaaagtaattcttatttcttaatataacattatacaggacatggttcctgccttctctcctaagaaagcaagaaaattcatcgagagtgaattgggagctcccattaacatattatttgaggagtttgaagatcggccaattgctgctgctagtctcggtcaggtgtttgaatctagcccagctcattccattatatttattattttggttaaattaaaaaggataaagtatctttctgtttattacattttcataaaattattaatattaatttgattcctgtaaaaataaatgacatattttattagttctcaatgataattccattagatatgatgtaggtaacaaacttacacatgtaatttgattataaataaattaaataatttgtaatcattaaattccaaaataaattaaacaaattatggcaactaaacatcccaaaaaattataatttttgtcatttcttaaacaattttctcatactatccaatgagattagggaaaagatgaaataacaccaaattctggtatttttaagtgtgtttgaaaagatagagagagaaaaaataatgaattaggcatatagaaaattgtctaaggggttaggggtctaataaagttaccacggaagacaaataaatatatgttttattttttcacgggccaaattaattcaaaaaaaattatgagaaaaaaattaatacttatcaaattttacatgatccaaagatattttacctaattaaaaatttggtcttatacttggatactttccattttcatccttaccttaaaaaaactcacattttaacccctgcgtgcaagcgtttaccaattacttcacagacattattatgcatgggtcaaaatgtaaactgactttatgtagggagaaaaaaggatcaatataatttgaccttatattttcttacattgaatcttttcctattgttaaaaacttgtagctttattcgaattggtcaaatttgataaatgtaacatgaagtgagaggcagcatgtggcttagtccattattagaacaaactagaacgtttctcccatcttgtagaccatgataatagcttattaatgttgttcttagtatagtaacatcaattttggaggagcctgtctgtaggttcatcgtgctattctgcataatggggaaaaagtagtcatcaaagttcaaaggcctggtctgaagaagcttttcgacattgatttgagtaagttgtggttactttgtttgttccattgacaaaacctagggattttgattaagaggatgttgccaacagccaattatcaatgaatccaaaagcctagactgttaggtacaaatttgccctttggtaccaaaacttatttatgtataacagcatagagtttaaggattactattttagtgaattcttttgtttagggtttaaggattactattttattgtttgtttgtaactattacaagtttgcttgtttgttatgtccagaaaacttaaagttgattgcagagtattttcagagaagtgaagcttttggtggtccacttagagattggattggaatatatgaagaatgtaaaacgtaagtaataagcattgaagtgcattgttatcgatatttcatgaagtaaagcatatgctaaattatgctcattgctttttcaccttttcttcattactttattttccaatgccttaatttttattgtgttgctcatgctattttgcagtattttgtatcaagaaattgattatataaatgaaggaaaaaatgctgacaggttccgccgagattttagaaacataaagtgggttcggatacctgtatgtttccttaggcaacacaaacatccgattataaattgtataaatttttaatgtctagtaaaaatattgaattttgaccacatcttcatttctttcgttgtagctggtatattgggattatactgctttaaaggtgttgaccatggagtatgtaccaggttttcatcttaactaatgaatgtgccttgtttctccttttaattatctatgacactatggtattatgagagataatatattgtatttatgggagctaataattctttctttaaagttatatattttatatgacattatgctagagaacgtatttttttaactgctcctatctctgattttattccttggacaggcatcaaaatagaccaggtggatacattaacttcgcgtggttatgatcgattgcgtatctcatcacgtgctactgaggcatacctaattcaggtggaccaccttggttctctgctaattacgatctaacagtaatatctgatgttgaatatggttttcattttggttactcagaataagtaaaatgtctcaacctatattaaaaccaaaaacgaagaggaatgaattgtcacttgaagataggtgttggtatcactcttgtagccaaaaaggttgagttaataaattatcattactttttgtcttacagatattgaaaacgggtttcttccatgccgatcctcatcctggaaatcttgctattgatgtggacgaagcaattatttattatgactttggcatgatgggagagatcaaatcttttacccgggagagactgcttgaacttttctatgctatgtatgaaaaggatgccaaaaaggtctggatttgtactacttttggattatttaaattcataacattgtcttttactaataagaaatcaatatctgatatcatgatacgctattttgttaagtgtttaatcaacatacattttttaatttcatgataactttttagtttgccacaattaactcaaacaagcacgatgacataaaatggcttttgcttcaagtacgattactattgtaaatttcaatccagctaaccagttattatcgtcagcaaaaaagaatttgacgttgctcataacttgaattgatcaacttcagtgtccctctttcacactattttaaacatacaaccatacaataaacaacggtgcaggttatacaacgccttatagagctcggagccctccaacctactggggacttgtcatcagtaagaatgtcaactacttgcttttcaaatattttgatttgtgtcttgacacttgattgacctcataaatgataaatttattttccaggtgaggagatctgtgcagtttttcctggaccatttgctaagccaggcaccagatcaggagcagaccctttctgcaattggggaggtttgttaacattgttacattggatcaatgaattcatagctgcttttcaattttttcataatattttgggtgtttgtttcaatggaactaaaggataagctgaaggtggagaattattgttttctattggttattccaaactatctggagaatctagtccagactttattattgactattgagggctttctgtggcaggatttatttgcaatagcacaagaccaaccattccgttttccatccacctttgcctttgttctcagggcgttttcaacacttgaaggtttgcatcttctcaattctcttactgtccctctctatctttctctctttagtggtcattcttgcaaaaaaaaaaaaaaaaaattaaacatgccctaatgtttactattaatttcacattagtatatgcattataagatggtaaccaccccttcctttcttgggaaaaatttaactgatttaagacacagttaggtaaacaaccaaattaactactcatccgataaattcttatgaacttatttataagcttaaatgtgaagttgatcaaaatatgtatcactttgaaatttattgaaataagttaaaaagagcaaaaggatatatatgttagttctttgtatgacttcatcatctatttgtatttctttttttctgacaggcataggttacacactcaatccaaatttctcctttgctaagattgctgcaccctactcacaggttcaaagttcagattgtccatgaacaaatattgttcccatactgcattaaaatgcatgctcatacacatacactttaccacgttacaggagcttttagagataaagcaaaagcagcgcactgcaccccagcttgtggaggagataagaaagcaagcagatgatgtaccacaccttttacctttgttctggataatgtttccttaaattagaaaaatctcatttgatgtgaagcatttatctatagcatgtgcaactaatgtgcatccacttgaattgatatttgataacgcttgctcgtgtaatacctttaggctacaacctataccatgtcaatgccatacagagttcaaagaatagaagagtttacaaagcaacttgaggcaggggatctaaaacttcgggtccgagtgcttgaggtcagtttttttttttttttttctttctttattcttatagttgaccccattttttattttaattcttaacaaaaaaattgtaaattttagtctctctacaattttttgtagtagtttattatcgccaaaaagtttctataacagttgtatatcgtcccaaaaacttctctagactctagtgttttcaatagaaatttaactttttatgattaaaacttacaatttgtttcgtataaggactataactcaaaatgaagttcattataaagaccaagtgaatagttgaatctttatttttcttcacatggtgtatgctatgcctatgtgtgaccaagtatttctaagcattttcctaatgggaacaactttctaattaggaggtcgttattctggaacttttgttttgtaaatttgaaattatttaacttgatttgctagtctgaaagagctgctcggaaagcaacggctttacaaatggcaactatgtataccgtattaggaggaactctgctaaatcttggtatcattatgagcagccaaggcaacataactattgcgaatggatctttcattggtgcaggtgactatatattataaagctttttctcaagttattgtccaatcatgttccaatttattcttaaggctgatagatatagcatttcaatgtgcaggtatttttatgactctatttgtcagatccatgcaaagggtaaaaatgcttgataagtttgagaaaatgatataaatggttaccaacaaattcgattctttcaaacttacgtaaagttatcctcatcttcattttattacttgtaatttgtaaatgttcaattttttaaattacacaggcatagcaaattccacgaattttacagaaacatgattgaatgatgacactacaaggcattttatgacttcaagacaaagaaaaaatcatagttttctaagtgagaaagcaaactgttggcccgtgagcctttccttattcaatggctaattttagacagagaacaccccgtgattaagatcatagagtggtaaagcttgtcttggaccgtaatatatctacgactaaacgaactctatctctcgtagcttgcaattaaataggttaaccccattggcggagccagtaaaaaaatttagctcatgccaaattttaagtagtgtcaaattttatttttaaccctaaataattatataagtatatataattattaaaaaaaaattcttcaccactcaattattacaaattttattttttaggtaatgtcgtgatcatggttgatttgcatgcggctccaccactggttaaccctcagaccaagaataaaaaattaagtattaaataaaaccaaaaataacctaaacgtgcatccaccaaaaaaaaaactaaacatgttaaatatatcatttttattttcattaactaatcatgaatcaatgggtttattagttaattattaatgactgatgtatgatgtgtcaattacttatttgacctaatcaactcttcttcctatttgcttcttgatttctcattaagacagtgacatgtggttgcaagataatattaaatggccgatgaatcattatttattgacttaagcaactcctattcatgtttgtttcattatttctcgttaagaaactgatatgtggatgcaaaaataacattaattgactgatgtatcaattatttattgacttaagcaacttctattactgtttgcttctttatttctcattatgaaagttacacgtagtcgcaaaataacattcttttttccatttgttaaaatttatcactgaacttttgttattttccattaaaatattatttttatataaaagaccacaaatattatttatgaaagacaattttaaaatttactttaagatatatttaaattttatgtaagtaaacgagagtataaacaattggtttcataattgtcttcagaactgcaagtggattttgagtattaattcatactctaagttaatataaggctaaattaaaagtaattaaaatctagtatttcagattttatatttgctgaatgatctttacattatcaatagatatttttgaagaataaaacatatcccgtcttaaagtctgattcgcctttatctgtaataatttaagaataaataatatatatatcaaagatttttatattattatttaattataaactgttatgtatgatgaatttattattttttataataattatcgaaataattatataaaaatatttttactagttgagaatataaaaactttacgctcattaacaataattaaacttataatttaatttttgtacaggctcatttgtaaaggtggttaggaaggtgagggaaataacgtgcattggctgtgggtcctgagccgttggttcgtaggctcgaggattcaatatggtaggtacacttttaatggtagttattttttttgttttttctttagttattaaatgcagtagtactatttaaatcatgttgtatatgaaataaatgttgaaagaaaatatttaatttatgtgcactcacaatttttaagaatatttatctcttatttttagggtgaatattttgtattaatgtatcatggtcagaaaaaaaaatccttaaataacttttgattttataaaattgggtgctttaacaatattatgctattttggacaagaacgatcaaaaccaaaatgggtttaaaatcataactataagaatcaaaataaaatattttaaactataaaaattaaaaggtagaattgttgcaactataaggaccaaaaatatatatattataatttggaaaagttggaaattttcaagctttcatgacttagatattttcaataaaaaaaaacaaggttttcgtgatataaagtatattcaacatggttattaaaaaatattttcttgagaaaagtatttaattttaataagataataattaaattattttatagaaattaaatttaagaataattaattttttgtagttttttaattcttatgtaaaattgaattttagtattaatagttctatctaaataatttatatggataatatgtaaataattatgtaatttatcacccaaaattgaaaaagacaataatatctgtttatcgcttaataatataattctagtattagctcatttgtaaaggtgggtgtggccgtgtgggtcagtgaagcaacgtgcaatggctgtgggtcctgagacgttggttcctaggcttgtggatccaatacggtaccgtttaataataggaaaatatatatttttagtcgtcatattttcaatcaaaggtattaaaggttcatatattttatattgattaatttaattctcagttttaaaaatatataaatttagttgccactatctaaaacttcgccatattttttaataattaaaagactaaacttacatttttttaaaaaatttaaagataaaattgatgaatatcaaaatatagaccttgaccacatttaacgaaaagtatagaagttaaaaatattttttttctaataataatttcagttcactttatattttttattaaattaaaaatatatataaatttttgtgagtttcactatttatttattgagtttatttttaatttgcagttttaaataaagtttaatcaatatgacatttgtttccttttaattattaattttttagaaaaaaaatttactatctggtatttatttttcacttttaaatttcaagataacattgattattagtttgtcaactattccctcacttcttacctaatttatacattttatatgtatttattgtgaagcaaacctaaaaaatggtataacaggaaaattcaaaaatattaaagtaaagacaatcttaaaaagtttacaaactaagggacaacaaaaattaagatattaatatcagtttaacactttttgtgtaaaactaaagatatgatccacaataaaaatgaaattgagaaaatatcaattcaacaccttatttttttattcatttttccttaataatattgtttttcatttttctctcttatatttaaagggtcttaaaggagatgggtcagtgtccatgctgattcctcttgggttcattcctaacttgaacaatagtggcatctcttatagcgtatttggtaggaaggaaataaatagatgagagataaaaatgatgaaattagggaaaagagaaatagagtaaattgaaatatataagaaataaaatgaaatgtgagtgtcttatttaagagaaataaaataaataaatacaaaaaatccattttagtattttcaatccattattttcatgacaattgattgtcatacattttaggtagtttaatgttggtttcatatgaattttacacttttttttttattttctctctaatttccatcctattaaacaactcacatttctcatttattctttattatccttcccttttttctattttccttctatttcatagctaccaaacaaattggtaagccaagactttgttcttgctagaacatcaactaattatttaaaaataagctataagctaagagtttataaattaattgatttatttggtctaagtaacttgtataaactaataagaaaagcctataattttccccaaaaccttatcaaacacactaaaaagaacaatgcgggtaggtaaattgctttacatcgtgtatttcaggtctctttcatagctatgcttgataagcaattgatttgggtaatggttatttgttacttgacggatcattttgaattacctcgttaatactgtctataaacaaattatacaggggttatgattatagatgtcaaataagtcatctacctcttatgctcgatcaagctaacactatccaccgatacaaatcaaacaccgaaagttaaatttcaaaacttccaacgaatcttatgtgacttaattttttattcattccaattacaattttgttattttaggtattgtattcattcaattctctccgtcaaattctattagaggacctggttggtcttgatctttattttgtaattatgtagttgagattatgggactgtttatctatctcatccttttgatatatatttaacatcttcatatcataatacttgatgttgaagaattgtgtatcatttaattcttattgagttgacgtgttcaagacaactcggatgtcgaacaatcttattcaaatacgacattaccatataactcatattagatctagaaaacaaacatattacatttaacactttatgctcttaggctaggtttcctttcttcgatacacaatcttccggcagtcatatataattttaacttgacattggtaagccacatgatacttcaatccacgcagacaagaactaattttaggcctacaatttatttatatatatatataaaaagtgattaaattatatcgatataattttgacaattattatacaattctataactttcaactaaataatattttcttaaaactcatatttggttgaaaatttctttcacataaatcatatatacaaaatttcatattaatccaaaaatttattaccttattcatatagattaaagtcaacataatataaacatttcaaaatatactaaaaaatgaataatttgattatcttcttcttgttattcaatttcgacaaaatttgacataaataatctcaatactatatagatataatttaacgtttgaataaataaaaatcacattttatattaaattataaaaatagtataataattgttaaagttacatcaatataatttgatatctcatttctatatatatatatatatatattaaaagcgggctacagtttatatgtatgcactttgtttagttgattggtaggtggctcaaggactgcaagtgtgtctttatatgaaaaataaaaaacaattagtgtgcatcgcatgcaccccattccaaatttaattaagttatcatctctgttcaactaccccacaccaaaccactttgccgttgctccccacagtgctctgtaccaaaaacgtgaccaattcaccaatcactgttgtatgtaaaattaccttaaacttattatcaatttatttttaagaagacactattgtaatcgacttttttcatgtgcatgaagatattttttaaccggaaatttaaaaatatttattttataaaaaaatcaaaatgaattatatctatcttggcaaagcttttctacacaccctaatcagcatgctatctaacaatttgttggtttttttggtaacatcataacgtaatcgatccacgttaaatttacacagtcgcctaagccaaaaaatgtataaaagagaagaagaaaggaaaagaaacaaattgaagtaaataactatgaaaaattagtgaaaagggtttttatattgtttatctaatcataaattatcatatataataaattaattaacttttatgataattattttgaaagtcattgttttttttactgatgatagtaatgcaattttatacattagtaataaatgcatgcataaaaattataatttaatttatatatatttagagtttaaatttttttacacaatcaataaaaaaaacatgatattatggtaaataaaataattatagaagtcaataaatttcttatacatattgatttattattagataataacattataaaaattagggatatttgcatccaatctaataaaaaaaagcttgcaaactgatctaaaaagaagaaaaaatttgataaaaaaaatatattttaaacctatgattaggttcgatttaaattagtatcttaaaaagatttaatccaatccaataaaatatgatttgaattagattggatggttcaaatcttactactacatatattattatttttaaaacaaacataaaatgtatgtcaatcaattgattaatcatcttacaacataacggtgaaacactaaaaaaatcatattaaaatatataaaaatcatatatggaacatataataagatatgtatattaaagagtatcgtttttgcttagatcgatttagttttgctaacatcaattataaaccaatccaaatcatcgattaagaaaaaacatgatccaactcaatttgcagaagatgacttttatgtcaaaagtgaatctaaatcgatttaatcattcagcatcgagcagaaaaaaaaaaaaaaagttgggaaaataagagtaattgtaactcgtggctcctcccacctgagctgaccatatataagcactcatatcagtcggacacttgttcacttcttctctctctcgtaagcttctttgctcaacactttatcagatccgcgtttcgcttagcaccacatcaatatcatatttgcttctctcttcctcacttttctattcaccgctccttccatcttatttgcttctttatggatacattaagacaccattccaaattttattattttcttacaatctcgcgctgcttcttttctttttaaatttctgaatcatttcatatcaagaggtcaatttctgatgtttcacataatccatcgtacatggaattagttctcaatgattttgcatgttagctcgttaattttacctaaatgtgtccgtatttaatgttttggattacagattccattttcatctatcaatggctccagtagctgcagcatcttcagattcaatcaagccaagaggtctttcatcaaacattttggcttatagatatagagtgtttataaaccctttctttggttcatttaacaccttctaaagttttattctgtataaccctttatttggttagttgacttcatatgttttgatttctatagatgtttgcatcgttggtgttgcacgtacaccaatgggtggatttcttggtactctgtcatctctatctgccaccaagctaggctcgatagctattgaaggtaactatggaagcctatgtcagtgcttattacattccatttgaaacttatttgtgtttacatatttttcattcatctgtagctgctcttaaaagggccaatgttgatccatcccttgtggaagaagtattttttggaaatgttcttagtgctaatttggggcaagctcctgcaagacaagctgctcttggagcaggaatatccaattcagttatctgcactaccgttaacaaagtttgtgcatcaggaatgaaaggtgtgtttataataaaaacaattctatttgtttctttgtatttttgtttaaaaatacagaaaaaggatattaaccttgttccggttattgcagctgcaatgcttgctgcacagagtattcaattaggcacaaatgatgttgttgtggctggtggtatggaaagcatgtctaatgtacccaagtacctggctgaagcaaggtcaatattgcctttaattcgacactctccttaagattagttcttgtgttgaaataaactgattcaatactaaaagttcaggaaaggatcacgccttggacatgattcacttgttgatgggatgttgaaagatggtttgtgggatgtctataaggatgttggcatgggagtgtgtgctgagctttgtgcagataaccatgcattaacaagagacgaccaggtattttaggattaatttctgttcagaaaggtttcggtaggaccattgtaatcaattttttgttgatgtctctgttttaccctcaggataactatgcaattcagagttttgaacgtggaattgctgcccaagaaagtggtgccttttcatgggaaattgctccagttgaagtctctggcggaaggggaagaccatcaacagttgttgataaggatgaaggcctaggaaaggtacccatataaataacttgaaccatggtaatacttgttcttgtataaatatggtgagcctacgaaaacacatgtttacccaataattcacgagactttaaatttgttagaagactataaggtgataattaatcaagagttgggattggaatttatgatttttttctcttcacattaacaacatttatatgtatgttacttctagctgcaattattgttactatagtcattaattttgtctatactttcagttgaatacaaataaatatattgttaaatttttccttttcctatgccagtttgatgctgccaagttacgcaaacttcggccaagtttcaaggagaccggaggctctgttacggctggcaatgcttccagcataaggttaatatgttatcgaaatttgttaaaatttttcctacataatgatttgtatttggatgcccttgtcaattatttattgttataaaatactatatatatatatatatatatatatatatatatagggagtcaaatgacttttttaattggtcgtgtgaccttaaaaaacttttaatattgacccttcgtgtatggttgtatggtccaaatttgttcatcttattcttatatgaaatggaattttcaatatatacatctccaatatgtgtgtcttaaacgctcaaatgctattaatatttttgtaatttttagtttgacattagtgattagccctggtttttaataaaatgaaaattctcttgctaacagtgatggtgctgctgcactagttttggtgagtggagagaaggcactgaagcttgggcttcaagttattgcaaaaatcactggatatgctgatgctgctcaggtatgtaaaatatattttaaatatgaactacatcttcagactataaaaaataagaaatagaaaaaccattttggcattcacattatttctagtgtttgatatgttataatttcatactcatatgaggttgagctgtgcaggaaccagagttatttacaacggctccatcccttgccattcccaaagctattgccaaggcggggttggagacttcacaaattgatttttatgaaattaatgaagcctttgcggtaggatttcatgtcaaggtttcaatggtagtaatttttcaactcatgatgcggtgaattttaattcttcatattgctgtctgtaggttgtggctcttgcaaatcagaaacttcttggacttaactcggttagtttttccccttgtcactgtgcgaaagttgtaatccattagtgcatgtataataaactatttccaattgactgtcttgaagagtgcatgctgttgtaagtccagaacccctctttgcacagtgcagaacatgttaaaatttgtctataatccataatttaacttcattatgaccattaatggatgcacccctccatttatttcttttactcaagtaactattattttgcaggaaaaagtaaacgtacatggtggagctgttgcactgggtcatcctcttggttgcagtggtgctcgcattctggtgacacttttgggggtatgtgctcagttcataactttgattttttataatatatagtagcatgcatgttgacagattgccttgtgtttgtagaaaaaagtctatcataatgctcatctcttaaattctttgtttaattatttaaattcgttatgttcaactattcaaaaagataaagataatgtaataattttattattttgtccacttttttttaataaattacattgagagtagtttgttgtgagagtgaaatgaacaaatcttgatcatttgatcttatatgaatggtattacaacacaaaataataagatttttaaagtgatcatctgatattttaagtaacttataattctgactataagttgttgttgggataaggctttgttgttgttgtttatgattttgactaactatgtatggatctttccccaatattgaatgtgttctttttcgattcagttaatctaaaagtcatcacctgcaggtactgaagcagaagaatgggaagtacggagttggtggcatttgcaatggaggaggtggtgcatctgcccttgttgttgagcttctgtaagacctatttcatgttccgtagatgtacttttaagagccagcgtttgctgcaaagctcaaaagatcttgcctccctctttagcaagcgaacatgcaagtttcaaatttattacaaggacaagaccgaacgagagagaaatttagctacatagttgttaggtttaagtcgcatcttgtgaaagtgaaattttcttagcatcaaagtagaacatgaaacaatattatccaaattttagttttcaccgaaattttattggggtactttggtttggaatgaatcattataaaacctgttattccaagcacaagattacagattcccgtggtttgcaaaatgtgttccagaactgaaattgccaaaaaagtggaaataatgaagttgtagttggtcttgcgtctgctaatttagatctaacattttattctgaatattctcgcacgccaagcacgtcaaagtattttctctttcttagggggttggttaaaaagattcacaacacgcagtaggattgactaagcattccaagatattttttttgttcctaagattaatatgagaaatttacagtgcaccgtctacattaagtttttgggttattattgttattgaagtaaaatatttatcaatgataaatatctattaaaaaatttgactaattatttctattagagtttttttaattatatttttttcatatataaaatttaaatttgagatcaagtttaattttattcgaattaataagatcttgataattaatgctagctttagatagaatctattctacttattcttattgcctttatttttcttccagttacttatataaaagagtaatgttagcgcatactttctactccatttggtaaaagatttttagtttggaagattagtggtcaagtgaacgacgaatatttcttgaacttttgataactaacatgaaggaggaataaaagatggttatccaaccaaatacgtaaacatataaaatcgtaaaattaaaactataataatataaaaagaatcataaatggtaaacttaatatatacctgcttaatttctgtacttttatcacactagtttttgtgtaaagaatgaatatttaggtgagagattttaaatagaaaatttaatttgtaagagaatttaaaattttaaatattaggccgattgttatagtttcttttatgaaatattttttttccgttttgcatgattttgtttcaatttttcaaaataactggaaactaaaaaaaatatgactaaaatcagaagttagtttgaaaagtttttcataaaatcagttatttcttaaaaaaaatattttttagaatggtaaacaaaagcaaattaccttatactgtttttttaaactattttacatgagaataagttttatttaaaagttgtatttgttttatggtatcgaaaaagattatcgagaaagtgactgagaacatcgtattttcatgtttgatataagttctataaaaaaaaattattgatttatgcaatatgaattatttatacttgtcattttattttcatggtgaaatagaaattatttttttggaaatggaaaggtccatcttacattcccataaaaaatggagctattttctactatgtcctcacttcattctttcacttttatagttttatttttaattttttattgaataaatttttatggaaattatatttgtacgcataatactagctgacctatttatgaaatttcttttatgaaccctagcctagcttgcctcagcttcttacgttttcgcgctctctctctctctctctctctctctctctctctctgttgtgaatcgagattcatcacttaaactcggcccattgtacgtttctctttctcatgttcgtttgctttcgattttattttgcttcctaacctcattcttttccttctttcctcagctccgctttcttcaaatcgtaaagttttttgggattgaagaccgaatcgttagtgagttttagttttaatgtttgtctgttacaacaaaatctttgttctgttctatagttttcaaccatcttgctgctgattttgtgatgttcaccctttctaagctctctcttgcagtgttactacctctgcatgtacttaaaaacttgttaggatttcaagcatttaaggttgaaaagattgtgtctatgagaatggagttgaatgctttccccaagtcaatttcaagtcagttggggattttagcctctattttaggttgtaggatatattggtatactgacctgaactttagtaaatgaccttttttgaaaacctattcagttcacattgtttctattggcctaaatttcacataatgggaaaaatttgggacttcattggtggaatgtcgtgttcaagtgagaagcatgggacatacaaagaaaaagtgctaggtgaaatggtgaatcacccaagcaataaattactgctatgactcatttgcttctcaatcattttgttcgaagtgatatttttggagtttattaagaaattctacatgtttagttgttcgtgttctcttatttggtttaatctattagaaaataatgaaaatctacatggtgatgctcttcatcttatccaaattatgtcaacccttcagcactattccaattctaatagcctatcatcttactgacgttgtcttatagtccaattgtgtcatggtacaacttcaatatcctcaacacatcccatctccctaagcaacaattatttttgtacaaaataatcaagaacctaagataatgagagaagactatgatatatagaaatatcgaatagtataaaaattcatttaaagaatttgatattatacacacacattattgtttactaacctaatacctattaagttacacaaaaacctctcatcaatcttcaatcgtatattttagttctgaatattcataaaatttccgtgatatgaattcatcattttatttttttaggggattttcagggtacaatggcttccaacatctcgcccactgcctttgataaagaacaggtaggcattcttttctcttcctccaactttggtaaaactgatctggtggttgatgtggtgaatttgataccccaatgtgatttcaagtttaaatttgcttttctcggtgttatttgattatttagttgtggatgtgtttcaataattcatgtggtcatggagcagatatttggaatggctgaaaaggagatggaatatagggtcgaattattcaacaagtaggtttccctgctcttgcttgccttgatattgtttgctgttgtaaacaagtatactgtacaatctgactgcatatttttatgagatttgttggtgccataataattcattttgctaaccttctgttgtttctaccattcaggatgacccagacctgtttcaagaagtgtgttgacaataggtagggaaactcttatgattgcataatctgcctgagaaagtgtcatgtttgatgcccttcaaatgtcatccagtccagtcaatttggaaattagtttcttatttctcagagttatctgctgttgcattattttgataatggctcaatgtgaatgttatgataatatctgtttatcactttttcttctcaggtacaaggagtctgagctaaatatgggtgaaaatagttgcattgaccgctgtgtttcaaaatactggcatgtaagatgttgcttaagtttactttggatctatcactggcacttattcgagttgctattagttatccttatttttctctcatcaaactctttattatgctttaagatagtttctcacatagatgttttaggatgaaatcttagttgggttttagtacttggttaaatgtgtgctcccttcgaaaattcctggttagactttaagtggtgtcttgataatttcatgaaagccaaggcaaactaagtatatgtggattacagaagtcctgacttcaatatggtttttgcttttgaaatattgggaaactgcaaatggtgattgtcttattgtctaagcagattttttttatattttttttgctaggtgactaatctagttggtcagctgcttgggtctgggaggcctccaatgtaattcaagtgtattgtattttcttttgcggttagcaacctgggagctatgtctacgatattattagttgttgcttccttggattcctttcttcccaaggaagcgtaaattttaatactttgcagagtctttattttgtggtcaatctgctttgtttagaaagggattgatgagctttttttaggtcttaacccctcagtttatcaggggaaaaagatcctaactaatttggagtttggctgaaagttcaataaaatttgacaaaaaattatttgtcaaggattgatgagcttttgaggtaaccattggtggacaataaaattaattttagataaataaggtcattctttgtttctaatttatgactttttagttctgccgtactttaccatagtgcttttctatcaaatttatttaaactttatcctcttgcaactgcattgttcttttcccccgttcgacgttatgcagttagaaacttaagaattatttcttcctttccgttttcaaacagtatacttacttacaattattcctcgcccactttcttgattatcaccaaatatataccacaaattcaaatcaatatattaatacctcaattgtttttttttaaaaaaaaaaaaaaacttgttgctatggttctgctctgacatcaagtgtcttaagacatgttgaagagtattatattaaaatgtgatagaagttattttttactctgtgtactaaacaaatagcaattacgggagtgacgagaatagagagggtattgcaacataactttcataaaataaatcatcgctcaattttgtaaattaaaacacaagttcgttaatatcgtgttcaaccatacaatcattctctctttcaaatgggatcaaacttcgataaattatgacattcataaaagtatgtattgggattaatacttttagagaaaactcggtttgatttttaaaagttacatatgccatcattgcatttgaatctaaatgcattattttcatagttataaaagattgataaaaataaaaatctaatttacttagatttaattccttctcaaaaaaatagttacagattttatcactgagacatggagacgttccagaaccttttgctacttcctgtctatgaacttctacatttctcagagatagatctaataaatgggggttgacttaggtcacataaattaggagatcaaagtgataattcttaaacttagaaaattaaaatgagatgccaaagttctattttagtctttatataaaatatgttaaagtgttaaacaatagcattacaaatactattttctatgaaaaattattgtagttaattaattaataatagtaaaaacgttgatgagagtggcagtggcagtggcagctaagtcgataccgtgcacatgcaatatgcatgagaaaatggaaaaggaaaatgtaaaaaaacaagaaataaaatagtagattaaaaggaataattccaagctagccagaggcaaaagtgaagtgaggtaataaagacagctaatgtgggtggggacagaaaagtggccgttagaaacttgaacgttaagccgatgacagagaatccaatactgatataaatactcccatttctgagtatctttcattcactcaaaaactagaagatggggatggttgtggtgatttctcttcctttcataatcttctgcttacttcttggttttggatgttacttctttggaagagccagaggaaggagagaggttcaaaccaacccacaagtttatgtgatgccaactccacccccagctgcttcaccttcaccaccccggccccactccaagccagacaatactcataatgtttgatttcaaatacatattgggtttcttttgttgtaattatttggtccttttagtaattcactccaataatattaagacctctcccccattttattcatttccataacctctatttattttttgtcttttatgtactatcccttgttttttggttgaaagttaaatcaacttttatacatttttattgtctgaattcaattttgctcaagttgtgtttatagagccgagcattccatagtgtcactggcctttgcttagtttcacaaaataccatcaatcagtcattagtctttacgatgttgggaattttaaaaccaaacaaattctcggttaagttctttcttttttttacaggaaaaaaaattagatgttatatttacgtattttttatattacttttttataaaaataaagtttactttgttgttattgttattttcttgaaaaatatttagaaaataagaaattaaccttttgttttgtgaacatgtaaaatcaacgttgaaaacatattctccttataattaatagttattaaaaataattattaattatattccctttatttaactttaataaggaacaataaatctaaattaagattttgttaacataaatctttaaaattaatttcaaacaactaagactaaaaagtttaatattgtacttttatatgagaaaatagttttatcataatatttgattgattgttataaaaattaaactctttttttagacaaatttaaataaataattttttttaataaatattttgaaatttgggactgttttgaaattatttcaaatttggagcaatcaaacaagttcaatttggacgtgttccagtctgtcgctaacattttttacggaatattgagattttaattccgttgctatttccgtcactaattcggtctctaacacttctaaaaaatagtggttttttaaaatgtgttgcgactgaatttgcgacggattttaaaaagcctcgaaaagtgttagcgatcgacttagcgacggactgaaaaacgcccaaattgaacatatttgactgccccaaatttctaaatagtttcaaaatagccccaaatttcgaaatatttgttaaaaaagcatttttttaaataatttgcccttttttatatatgtgtgttatacaataaataattttatttatttaatattttgttcacttataataaaatcagcagtaaagaaagcatgaaaaaagagaagtgtatgtctcataaatttgatagtcattgacattggcctgctcctatgtgtttgtctgtgtttctcgatcttcctccttggccttgccctcgagaactaaaaatcaaggaaaaggagaaggatcaattaacaaacatcattacataatataatataaatatatattagaagaatctaacagttaaggagccaaagccacatcattcaattcctcgatctaagatcttgcagctagaagttaggagctagtgatgaaccatggcggtacgtacgtacgcagggcggatgcaggtgtaagattcccccccttaaattttcaagaatagataattttttgataacaataaaataaaataaaataaaaaatagtttagacgtttgcacgaaaggagaaattgaaaagcatagaaaaagaataataaaaaagatgaaaaataagagaggagtgagtgtgagtatgtatgtttgtaatttttatgaatgcagtgatcacactcttgttaattttaagcaccagtcacacgctaattttgtcaattttttctctcttaaactgaacctttttcacacttttattataattatttgtttctttattttttattatgtgcccccttacttttttttccggatccgcccctgtacccacgtacgcatgcaattaattaatatttgttgatggatggctctgtcaggagaggggtagaggtagagcattacctaagtttggggactcgggagttctcggtaatcttcaacaatgccaggaatgagagaaggagtggtgctaataacatgtaacttaattaccttcttcttgcttcatgctcaatcccggcccttacgttacgttttttcaaatccatcattgcagaaaaaatggttttgctgcatatgtggtgtatgtacttgggctttagttggatcagtagtatttattgcatcatatactggtatacttctctctctattctttatagtagagtttgatatttgtgtataaactatatacttatttattcgatcgacctgcgtactattttatatatttcttattggattaactgttttatactaattcatctctctcgaccctcggtcgagtcacacggaaaaaaacaaaatcataattacagaaagttgattgcaatgttactaaagagatgccagtcactctcctgggccaaagaatttattcttaattttaaggatttgatattcaagtgtgtaaactgtaaagtgagaaaatggatatgtatctatccctaattgaaaatttgatatttaatttacataataatttgattcaaatttaagggttaatgcacgtacccttacatacctttgtcgaggtaaattattcctttaccggtgcattgtacttcgtgaatttttcctgttaccatctatacctaagcttagttatgagccaatccgcaatcctattttttatcttgtttatttttaagctataataagttcttaaatgctgatagaggtctatttttttatcaacagcagcaattattttaaattactgaaatgggtataaattatataaatgaataagtcgtgttgattttagtaaattaaattttacaaaatatacaaagtcgtgtttaaaacatgactttttttgttcaaagttacgttttataacacgatttacctttttttttaaaagaaaagtacacatttcggtattttttataataaaaaaaaaatacgtgtttggtaaagaagccgctgatagagttagagattcctgttaaatatggcacgactcgagaatgtaggttaccactgcaacttacattcaatatctgagagagatcttgctcacaaaatacatatgaatttctcaagagccgtaacaacttaagcagctgaaatagagtgaagggaaggtggattggatacttaccggataagaaaagaaggagaaaaacaaatctaatattctaacaattaacatttaccgattaaaaaaactggcagaagtaaagtaaacgaaaaaaagatgaataggacatggtgggagcgtagaaatggcctgtcattttttagtttaccggaaaaagaaatcaactataaacaacattaaataacatatttccacatgtattatgagtaggattgaactagttatataaatatccatgtgatgacaacggaaaaaagtttaaaataacattctcatttgtactgttacagattctcagaacatttcgaagctctaaactctcgaggtacccaactttcgttcaaacaatcgctgcagaaggtagacttgcagcgcactagccccaatcagtgctgctgattcaaaaattgccttgtgtactgctcttttgctcattgcatcgttcactgcattccagacataagtgaacatgatattgcatccgcagtcaagaagtgttaatagaaggaagaaaccagtttgtagcttttatcaactacgatgcttagtgtatttgttcagtaaatggacatttcaccataatcaacagtgaacagtgaacattgccaaagagatagggagcaatgttctcaacagggaggtctcttttggtatggtatctgaataaattaggatgatcacatgttgggacatttgttcatattaaatggtatcaagaatagaaaacaagagggcatacataaacttgggtttttatctttaacacgagtaatatgtataattgataggtataaaagattttatgcacagaaaaatgtaaattgtgcgataaacagcaaagtaaaccttaaataatacctattgcttggcggtcagtctgagcctctaaccaatgttgttcaaactggatgttgtatagagcttcctccaacttcccaatctgctccagcaaaggggtgaaatgctctgcagacagtcacaaaaagtttcaatgaaagttctcttattttttagacttccatgtaacttaaaagagcagtgttttacattttttttaaaaaaaaaaaacagcaaatacaagtggacctcatagaaggggcattaccatcttttgcatgttgctcaaagtaagagaagtgaccaacatgtacatcaaaatcaacagtttcatgataaggagacttgttggtgaagcagaatttatggaccccagatttgtgagccacaaaatcgaatttctcagttgccttgtcccgaaaatcttgtatttgctcgccagaaggtccctttacctgaaattcttacattgtggtgtaatgagattccaacatatgattgggtaggtattaaggaaaaagaaagaaaaaaagcatttcaaagaaagggtattcctaacaattgtgtaagtaccatttatatgtaattgtaaatgtaaaaggtgatacatgtaaattgctacatataatgcacaacatctctatgaccactcatccttctctaaattaaagaactactgttttgaacaatgaagttatctcctaaaccattgataaaactttttgcttcattaggtgtttgacaagcattcgtttttcctataaaaactgtgaactgttttgcacagtgtagttatctcctaaccgtggcttcattaggtgtttgacaaacatactttttgcttcatggtcaatgaattaaaatttccagaatggagttcaaggctttaagcttaacaacggatcccaagatctagaaacaaataacagtttcatggttatagtgaagaatagcacagaaagcttcttcagcccagagagctacataatagctttagcttcacaatataaaagaataaactattaattttgtccctcaagtattatcctgtctattatgagagtagtctctggaataataaaaaaactatataaataattcctcaagtattgaatattcatcaatttaattagtctcaaaggtgatgcattttagtaaaattcagagaccaatttgaagggccttttaatacttgggggactaattagcatgatttcaaatacatgagaaattacttatataggttttttacattagggattacttatgagaaagggtagtatttcaaagatgaaattgagggtttgttccaatattaaaccctaaaccaatagccaacaggtaggcgtaagagaaagcaattattgttggttctctttgtattcatgtaccctatggttctattcccttccctaaacttcctgtcaataatatatatgataatattaatagcttgagtaattgtgataccccttgaaagtgataaagctgaaaataaaagcggtaacatagaatgagatggagtgaaaaagaacataccacgagatcgacaccttcgtcgccgtaatgccagggagaatcagccttaataacaacaaaagagacatgaacagtgtcaccctcgtactttacatcatgggagaaacactcgtctctgtctatcacaaatcggataccctctgccctttgcaagttccacaacgccccaattaacgcaaacaccaaagcatgcctcaatgataacctcatctgcaaaacaatcgattaaattcacacacgtctcaaaaacacggatccacaaaatcaaaagatatatagataccttggtaagtttctcttctcggaaatttgaagaaaaggatggagatgaaacaagaaaacacaacacaacacgacacacgcagttgtggtttttaatttcaacgtgtgtttggttcagactttaaaagtgttttgctggaaactcgaaactggaaaacggcgtcgttgccctaacttcggcttttctaatgtgtgggtttttgattggacggtgtaagtcatcgatccaataacaagttcacacgtaggatatgtttcaaaaacaacaaataactctcctcgtcttcgtgtgcgaagtgcaaactaacacacgtaagctgagttcagaatctcgtctcgtatagcaatttgattcagatcagatattttttaatcaaataataataataataatttttatctgtgtaaatgcggaaaaaaaatagttgaatgtagtggtgtataactttctcatattgttatccaaaattcattttttatttacgtaaaaagtaaaagaatcatgatatgttaacgattatggttaaggcacttctagttcaaaaatatagtgcatataaataaatttgtaattatttaaaatatatttacgattttatatttttaatatgataaataattatttttaagaaacacctttttataaaaagtatgcttaagaaacaataataataataaaattaaatcctaaacccaaaatattttttataaaaagtgttgaaagtaactaaaaatattttttaaggttcaaacttttaaaattatctttaatcatattttttaattttaaaagtttagattttaaaagttaataatcaaagactaatttgaaataaaaaatgacatgtaatttaattagttaaaaattaacaatatcaaaattccaaattactgggacaccatagaaattttaaaattacatgtatttagactattaatattaattatgaaaataagatttatgatattataattatagatattaattttttgaacgtatgattttaaacgaattgaacctataatgggttagaccattactgttagatacttctgttcacagtttattttgaggtaataacaagaattcgatattcttttcaagtacatgcctattaatgttttataaattataattatcattatatgattatgactgtgcataattttctttaaataaaaaattgtcgctaaatttgcataaacttcttcatcattacaattattaatttgtcattataaaaaaaaacaaggatatatagcatcatacctctgtagccaacaaataagtctcaaaaataaaatacaactagcagatgtaagaacttaagcctttttaagaaattccataacatgtgtgttgagaacacaacatgctattcggaaaccatggaatccagctcctttagccaaggccttgtactctttttctgttctctcttttccacttgggctatgacacaacatgataacatccatttgaaactcacaccttgcagctaagttagaatctggggtttctggacaaataccttcagccaaaatcacttttccagtgtcgtcaggaagggaatcataacaattcttcaacaatttcaagcattgctcgtcattccagtcatggcatacccactacatacaaaaattgtattgtcatgatattattgaaatataacattttaacttggtttggctctttccaaatataatcaatataaaaacttgaaaatggactgtttaccgaatgaacatcatattaataacataccttcataaaaatggcgtcaccttttggaacactcacaaacatgtctccaccaatatgttccacacctgcaccaaacccccatattagttctataatatcacgtacaacaaaaaatgtgataaattatttaactcatcttttaaaaatccaaccaatcattaaaatattaggtgacatgaaataccatattaacaaagtcataaaaaataaagttaggttaattttaaattaacataaaaacaccatattataaattgtgtaagataaaaaaaaatcttaataaaagtgatagcaattcatcaataaaccttataaggccttaatttgattaaacaaaacttggtgagtaaaagaattttaaaattttaaaatgaccagttcccattgataattttgagttaagagacttgccatttggtcaaattccgatttttaagggttcaaggtcgttgctttctgcacgctttgttggctttcggactaatcaatccgaaatgtaaaattacattccaaattagtaatacattttgatttacgaactgaccaattcgaaagaaaataaaacattcctgcagaaagatgcaggaagcaatagtctggatccaagtaggaaaaccaaacaacacttcaaattaacatcccaggcccagcaataaatacaattattatatacaaatgatgctactattaccaaattaattatcacaggaatgagaatgtaagaaagatccaagttagaacactcgcttagcttattttttaatttttttatagtcagtagagtcaatccaaactcgtaagatatgaactaaaaagcacctgtataagctggagcttctttgatgacgtggggtaagtcaaaattaacacactttgtggtgggatacttagaggcaaccatattaataatagctccagtcccaccgccaacatcaaccacagatccaacaccctcaaagccattatagatctcaagaattttcttcattgtgatgctagagatatcagacaatcccttattgaaaagcttgttgaatctaggatttgtgtcatggaattcaaaggcagtcattccataagcattgctgaatggatgcccaccctccttaactgaatctgtcaagtggtacctacaagaatacagtcctttaaactctatatctaagacttcactaatcactaatcactaaccactaattatatatataaaaagtttcgttgcaagtatatttgatttatgctgctgacaatctttactttatagtgacatataaaactataaatatcattacaaattctcatttttaggtgagaatcttttctttagaggtaagattatacgaaagaacatataaaaggctagtatagcaccaattaaggaaaaaatgacaaaatctgttaagataattttgacatgtaaagaaaatcacaagagatgtcacttaaaaaagtagattgcattgattttagtattgtgaaaaacaggaggagaccaagaaggacattggagcaagttatcaagaaagatttcaagttttgatttttaaacgtgttgaaagatatcatgtgatttatatagtcaatttcacttagttggataaggctttcttgttgtattacaaattaaactctcttctttatagtgaagttacctttgacatctaagttcattggctaaaattttgttggcctctttcttcaattattttggcaaaaatcgcaaaaaaaaaaaatcctaagcgttctatctatgccgttttagtcatatgggcaaaggtgattatagttattgaattattcatacttaacattttatatcaattaatgggagttaactgatacctctaactctaactttgctaatacaataaaatcaaaagggccagaagaaagagagaaaaaaattaaaaaaagtgttgaggaatagtgaaacacaataccacatgtctttaaggactttgtcctgttccatgagaaagtaagcagccacagagacaccatcttcattgttgacaaggtatttggcttttgggtgaagaccatagtgcctttcagccttaccatgaggcagttgatggagtgtgtaagtatgttgtagctagccaagaggcgcaacatgcggtccagcatagaaggtgcgtgagggttctttattgctgggatctcagcagctatatgagaaggggaaaggtaagctccaggacctgccttggctatagctccaaagctgacttgagaaccatggagacagcagtgccacccgctagttccatgccaaacaagaaggcttcttcatctgatactacctccattctgtgctaccttataatcactttcaacaggtaaacttcagaatgactcagaatctaaagtcacacattagtcttactgttatcaatgaactaacaaaattataatctcacagattctcacaactcacaaagactcacacgcagcggaaaaaatataaaccgagagagagttatctaacgcgcacacacactaggaggaagagagaaattcagcttaacttttactcactaattccttcactcactgcatatttttaaaatgttacatgggtggcctttttataggcaaagttaatacaataaaatattataaactaaatggctaagaatgaaaaatggtgcaactatggaggtgccgcaattgccgtatcttggacaattcaattcagtgacttcttcattcatctagtgaggcggttgcattttttttaggcggtgaaaatttgctttatgttgaagtataaatttgcttgatttatcttaccgacacttactaaccttaattaaattgctccttcaaatgatattttacttgaccaatatactttagtctaagaactgtgaaagcttttgccactggaactcctccttttggtttagaaacacctgaacaggagaaaacaaagttttcagaagaaaaaaaagtgaataatactatttgatatctcagacagcaatataagtttaatgattgagtaatcttagatagtttaaaagaaactgcattgagtaaatattagttctgattacaacattatgtaagtcagtccctaatataattatacatgagcagtattcagttctccactgtcaacctacaggaaacctgtgaacagaaaaaccaggtatacttttcttggtaaggaaactttggctacatgggaattggcttaaaacactatctgcgtgtgtgtgcaaccccttctcactttcagttgtaaggtaaagtaataactaaaaaggagctagtcctcatgaaaaggaatgatgcaaaaaagtttatgaagaaccctttagtcctttcgacaagcagaaattaagaaaagtttcagactaaaagccattataccctgcaactacctcataaacagtgagtagtttttataaattactatttatagcaattaactcttaactaccttgctgacccatgtaaacgcaaaattaattgacttgtgaatcagttgggtttgttatcttcatatttcctcttgaatacacttcagtaataggccccttattcctgacaaacacagatgcaatagaatacaacttgaatatggggatacaataaattctaaaatcatcatcacacaacacgtctacaatacaacgtataaaattagtagtacaaaattaacataaagaggtactaaaagtatttaaagtttttatgctgcttgaattgaaacacaatgaaaaacccgagagagggtgagagatcgatgaaagtgagattgaacctgagagaggttcaagatcgagttgagagggtgaaagtgagattgaacctgagagaggttcaagatcgagttgagagggtgaaagtgagatttctaaaacttgaattataatatttcaatcatgtgaacttacagtttgatatgctcaccaatttataaattatattatgtttataaagttaaattgattatagaattgaaggtaataactttattgatgtataaattttattatgctttttaaacatattattaaattaaaaaaatgtcaaatcgattgaaaaaaaaatgacaataagaattgtccttataaaaccaaatggataagtcctcatttcacaatcttgatatcatcataacatgtattaaactaaaggtcatctaatggataatcattaccttcattttgtgatcattaatcaatcaataaaaataatcaaatattttaagatattcaaatacactttaattcatgaacacaagactaagatgaactcatgtttcccaaattgtaaattcaaacataataagatggataaaaagtaataacaagttgaaactaaattactgcatcatttcacaccggtaataatcactaacaaaattaggcatggctaaaacatctatgcaaatgatgatagcccataaaacttgagcagaggatcaagccataaccgtaatcaaagaaaagaatatacaatattttaacttaataactcaacgccataatttgttaacatgattaatcaaataaaaatagttcacgtcatacaaagcccaaaaattcaattttattgtaatttggtagtttttattgtcaagcaatataaactcaatacttacagttaaatatcaaaaaactaactcatagatagcaccatctattgaattggaggatatttttgaaccaattaaaatctatcaaacttcaaatcaacttaaagcaatatcacattatcaaaaacatatatatgattatgaaacacaagacacgaaagatttcattatgataaataatgatattatgtcatgaaggattcaataatttaagtcctggtacacaaactaccaatgtaaatacatacatgtctcacggttaaaagcctttgatcaaaatcaagcaattatagacatacaattttttttaattctactattttgaagtgttaaaagaaaatatattcatggaatactataacaacatattgatgatagaaactgagtgataaggaagaattttgatgatgcatatatacaacgagaaaaaatgttagtaatacacagacaatttttataatacttaatacaaaaaaaaatttaacaaaggagagtctagaaaaatatctgagttgaagcgcgttatgcgctgtctttacgacaatccattaattcaatggagtgcaacgaaatgatcttgaaccaaagaacattgggctccaaaacatataattgtaataatataatataatttaataaaaatgagaactaagcaaatggtattttgatgtaactgtgtgcgtctgaattttttcttcttattttttgtaagagaaagttatatataagaagaagcaaaatcaccaatatgcggtccaaatatcacacctaacaaactaataacaaacataacaataaatcttaaagcacaaatattttccaacaccaaatcttgatagtttaaaacaacaaatctcaaactccatatatcataatgaaaaatattttccaacaccaaaaccagggaatatcgtatgcacttggaagtctatctaaatctgggatattgcaattaagctatttgctgctgttatggccatttagcttaactgagttagttgcaattaatgatttcgtaaggcaataggtgtgccctccaaagtcgtgaatgaattaagatgtaactactagtagtaaacctgagactatcgtatgcacttgaaattaagtactactttgctgtctacctgaatctatgacactgaaaatgatcgatcaacatcaattgacaacataaggccgtttttttcaaccccttccacattttgctaacgtacttatccttgccaacattaaagggtgtggccgctggcgcgcgagcgagggtatgcattgcgtgtggtgcaaattatttatagaacacttcattcttctttgcacccgccatatctaatgggaggtgtttagtggatgagttccttcaaaaaaaattgggtttctaatataagaaactctttttagagtttcttatttttcaaacatcaccaatcaagaggattttttgaaatttattgtaattttttgcatttgaacaaaatttgattagagctcttataagtgacatgacaatgtaggaccacaaaaagatgagtaaataactttaaaaaactcatataagcacctgctcttccattgcaaaacaacaaggcttcgtcatcctctacacttacctgctgcttctgattcactcccataactgcttcctcaatgttgttctaccactgccacatatttagaaattgtctcgtacaaatacttggtttcaacttttctccatacgtcataaagtctaaaggagacaccattgttggtaaatgaaattctcatgattatcctatctaacattttcttaatagttcaaatgtactcttgttttcaatttcattgagatataaaaactttttatagtttgatttttaccctttttaattttactatcccttgacttaatacccatattaacgacagtgtatctaattacaatttgtttatattcaaatctttaaaatcgtccaggtcttattgtgaaaaaaaaaaaaaagctgccccgccacagcaggcgggttgcttcctcttttagaagaacaagaaaacaaatgttttggtgttcaaaccaaataaattgtttcatttgataaatgtttagaatcataccagtatggtagcacaattttctaccaacataaatctacataaaatgtattttctacttaaaatctaatctatagatatatatatatagtgtgtgtgtgtgtgtgtgtgtgagagagagagagagagagagagaatttaatcaaattttagcttttaggttccaaattcttaaatttatttcacaccccaaataatgattaaaaagttttaacttgatttactttattttaaaaaaaaattgcttaaaacaagttcaaacaccaaaatcacacataatgtatccagtatccgaacaaatatataaacagaacaaccaaattatatatcattattctaaaaagaaagcgtgtttttggtcaatataaacagaaacataaaaaataaagatatcgaataaataagaccaacaatgggctcaattttggagaataattacaactcacttgatatttcgttattccttgggccttggctttgaacatatgctgggccctagggtgcaacactgtcaaatgtcaataaatattagcagatatgcgttaattttgattttgaaatacaagcaatttgttcaccttttggtatgagcatcgattcctacttattaaaaagaaaattttgggaatatgcaatggattaacgtcaaactgtttcactgaatcatttcatgccagctatttttgtttaccaaacataccaggtaggcaagtaatattattattattattatttaatataaattacctgcttcagtcccattagtattgtgtaaatcaatatcaaaaaattgtgtttgactttattttatgtttttggtgaaggactttatacgtcacatttcacttacgaacgaaatagaaatttcactatttcagtaatagtaatgatactagtgtagcccatatttgggtggctatgaaaagtgtagcatgttttacaatgatttttatttatttctctcgtgagctacttcgagtacgttgtagtgttgtacacagcaatgtagccttcagatccaccattggttgaaaaacaagctataaatgacaaaaaggaatagcataatcgaaataaaattaatggtgataatgataaatgtcaaatttattgaatttttatatatattttgtgatatttacttgacattttagttaactttagactttgttttaaattcagtttttattttgtcttaggaagaattttatgttttagttatttttaataaatttttttatattttttagcaaaataatgggtaattctgacaagagttccagaggttcaaaatcagtagaaaattatgtaaggagaaattgtgaagaataaagataaaactaggaaacaagatatttttcaatgataaatcagatgaagaataagataattatttgaaataattagagatattatttgtttgtaattttttgtaatccttttccttattaaacctaattacaattctataaatagaaggttaaagtatccattgtaaaatagtaaagtcccgaacagtttttagaattatattttagacttacacctactagacacattcattattctattagacactttagatttcattgtattatttttatgagtgcaatttcttccatctaggaaaggaaatgatgaatcttgtttcactttaattttatcaattcaacacttcatcttaagtttttttatttgttttcatacttaatgtttttatttgattggtcatcttatagataaattcaagaattgacttgcgctttaacgagcctggttgaaactcgattatgaattaagtacttaattaagattatctcgagggatagaataatctggattaaatctcgctaattctcgaccattgatgttgattgtttgtatccatatgtctaagggattgagtattgggcaagtagtttagaatatgtgaccattcaagagctgggtagaatacattagtgaaccggggatgaacatgagagattactagaaaattgtgaagttacggtggatcgaataaattccaagtccaaacttagatattcattcatcaggatcaatgtcaccatcaaagtctaatatttctatttttacttaattattttattgtcatttaattttattgtaatttattttattttatttatttcgtgacaattacaaaaccaaaatacaaaaatataatttttagttaaataattatatgaaatttctgttttattattttaaaaaataacctgaacgataatttaattagtacatcgtaattgagttacatttaacctataaattaaatctaatatgaaataaaattttaataaataacaatcatactatgtacatgtacgtgattgttttagcttttgtgatccacgtttaatccaaattcactctaaagcaacctaaaaacaaataaaagttatttcatggatctacgtccaaatatcattggacagatcaccaaacatactatataaccaccacatccaaagtcatatgatctgaataatattattttcactatattttcacaatactttaacttttatacattttttctctatcactcattatcacatcattttatcttattttacacttttcttcctattcttcctatgattgttcttgttgtagaaattgttaatattattaagccttactagataactagtgtacaagtaaaggatctaagatccgagaaaaaagtctaaagggaaactttattcataacctttgctttaacaatgcagtatttggatattataagagtaagtattaatttagttctttttaatttgtattatttgttaattgatactttatattataaaaaaaataaaaatcaaaagtaagatattcttgtatttaagtaatagtcaattaatttggtctatgtaattaatgatattgattagattatttcttaaagaatttattatatatatgattgtttaaataaattgtttatccatcttaaatttataagatttataatatcacgtaaatttaaaaattttacacaaaaaattactttaatactaaagttactacgataactaaattttttagttacattaaattttggattgaaaaaaacgttatttttttttagtaataatcaattaattgtataagtaactcttttaaacaacacattatcaaatcatcatctccaataaatttttttattaaacaacaatatgtaactttaatcaactcatttaatcacccgctttaaaaatgttgtcagtattattaactagattggtttaactttttttactttagtaagccaattcaccggtctttgacgatagacatcaattaaatgatacacattcatttcatagatcaacttgatattcattctaataaacttgggtggagtttttttttttttttttttctttaggaataaattggtgaaattgtgaaatatacaacgttctttatttttaattttctcttcctcgtagctttttttataagccttgcacgagaccactttcatagcgagtttttccttaaataaaaatatcataataatgacataccacgtgaatggtctttatctttgtaccaaaggaagtaggttggtctcatcagtgtgatgtgcacttattgtttccttttatttatttattccttttctataacatgttttgttatttccacgatttaatattcccacgatagcaaaatattaatctaacaaattaatacatgagaatcttttataagttcagagttaacaaatatcaaaataatgtttgtttgtacgaaataagattgagagaaataatcttataatttttatagatattggaggtatctcattttaaggttgcgttaagtccaacttttttaaagtttttggtataaactataggtatgttttatgggataaaatttatcatagataacaaatttttatttacaagtactactatttaaaataatccctcctttgacacttcttatatatatagatatatatttttaagttagttaatataaaattgtataataacaattaagattagttagtgtaaaatcatgtaaaattagttgtgtttattattatcattgtaatgtttaaggtgataactagagtaaaattatgtaaaattaattatctgtttgttatttttatgataatggttaaggtggttattatttaaaataaaaattagttctaatttcatttgtgaaaatagtaaatttttttttgacatattattacttattaaaagttagatatttaaacaatttcaaataaaggggaaaaaatcaactcctttaacaagtttatggattcatccttgtttatgtcctctttgaaataggtgataaataaaagatatttagtaaaaaggaaataggaaagagatgagaaaaagagaaagagagattaataggaataggagataaatagtacattgaatttcataatttttaaaatcattttttatttaacttttttttttacaaaacaatccaactagtaatttgtatctgcccctcttctcccaatttatccttcacaaaataagcgcttttaatgtaaaagcttaaaataagggtttaaattaacaaagtaaaagttgtttgaaaattcttaatttttagtttgaattttttaacctatttaaaattaatttcttcactcaatgaatgatcagtgtgtctgtgtgtgaataatcaatggcacttacggtgttaaaaacttaaaggttagcttcgtgaagtcttttagtttgcgtggacaaattaatacacttgtttttttttccggctaattaataaacttgttaggttagataactataaaaacaaaacctgtttataagttttgtccttataaatatagactattagactgtatttaaataatcaagattttaagaaaaatgtacatgatttttttaaaataatcacgggatcacaaactaacttttcgtttattcaaaaaataaaaaataacttttaatcattgaccattcatttatatataattgttggaccaaaatttataactattgtttacaaattatatcttaaaaatcgaatttgaattcttagattgaaataatcctacatgaattgattgattcatgatttttttttttaaaaaaggagaattgattcatgctaattaatcgtatactgttatatatatatatatatatatatatatatatatatatattagtatattttataaatatatttaaaagttatatggatgaaatgagatagtgacggaccgatgaagaacggcttaaatttgtcgattccagaagaatttgggacccacgtcgacatcaaccggccggtccagcccaatgtagaaacgaagccggcccatgccacaagaacaaccgctgaggcaatatctaatgcctcgtttcttaataaacaaattaacccccccaaattattcatattgactggaccaataaaacgattaatagcctttttcttcttcttcttttgtttaaacagtattaatggcaacataactacagcattcagttttaaataactgttaatttcccccacaaaaaaattaactaaagtgcattaaaagtcagtgatatgtactttttagataatatttataagtttaattttgatttataggatttttatattatcatctaaatataagtaaaacaaactaacaaatgatagcaattattcaagagagaaaaaatattttgagtaatatttcttctaaattcatatataaaaaaaaagtaatttcgtatattggacttaaatataaataaatttaactattttttatatttaatgttattattattaaaataatatttcattaaattctaattataattctattttctatgattctgtattatttgttataataaatgttaataaaaataatttaatttttaacttaagattagtcaaattaaataattttatttttgtttatataaaatatgttacatataatcaatcgaattctccgtctggcatcataattatctttacatggtgatgtaaatagaattggatccgataaaaaaaagcattatgataatgaaacaggttggttgaaagttgaaacttttgcagaggcttatccatatcacaaacgccacacgtgatttcttccgtttggcgctagtgaaatgacgagcctaccaaacaagccccacattattacagttttgctcaaatccaaacaatcattttgtgggtcacatgagtgcaaaaatatatgtcaacaaaacaacgggtcctcacctttctccttttctatatttcactttacttttagtaattaaccaacaactaattagtatggtttaagaaagaaataaaatctgagaaatatacgggaatttttattttttttaaatatttctttttgccaaaaaaatcatcatgaggtgaaatgagaatttaatttaattttatcatttctttttttgcacatactaatatataatatatattttataaaaaaataattctcttaaatcaaataaaattattataagtaataatattctgtttcagatttgatttacagttcataaaattaaaccgtaaagccgtaaagaagtataatataagagtaaaatactttttaatgtttattgctacattctttaataaaaagtatttattgctatatgaaataaaatatatatacattcaataacataagtagattacacaattatgtcagtttattattgaaaaaaaaagtatttttgcttatgttggggattcttaaaatcgtgttttgctatatcggtgaaaataattttattatttttcttatttgactatcagcatgaagtctttgacacgacttattatgtaactatatttaaatattggaaaattttcttaacactctgcttgcacgttatgggcaatcggagactaccatccttgattctgaagatttgaactattccttcttgctcttgattttgactttgtaaaactaattgcggacaagttcatcggttatttttaaatagtaaagtaaagtcaaatgttactctcatgaaaactttaaattaattattaatctcccatgtttattaatatttgaataataaattaaaatgaaataataaattttattttatatatatatatatatatatatatatataaagagaattctataataagtactttttacagaaaaaatacataagtaactagagagattatatcacaacaaaaattatgatgaaaatttcatgtcaaaactattaggatatgtgtttacttaactttcatttgaacaacccaatgcgtgtttggaaaattttacattgatgcagtagttaagacaagtaattttgggaaatttttctttacgcttaactcaaaattgttattattaaactttcacttcgtcttaaaaattgagtatgagtttaaaagtcctggtgattggtgctcatatgcgcataataaaaaatttatcatattttttcatgctatggattctattattaatttttatattatatcttaaatatttttaaccaaatttaaaataaaaaataaatacttaattagaccttatacatttattctgttgattactatgataatactactgagtggaggtataaaattgatccaatagttgaagaaaaatgaaaagaaaatagaggaaagagagatagtacattcaaattctttcactaatattttcaataaaataagcattcaccaataaaaaataatagtactgcattcttttaaatatcatcacttattagtattctcatactaattgattacgaatatcttgaagtacagtgctaaaataataaaataaataatataatgattgaaataaaatatataatgtaaaaatatccaaaaaataaaaatagcacaaagaaataataaaattttatccaatgtaagtaaaggagaaagttaataaatattttaagaataaaataaaaataaaataaaataaaataaattataagctagaagttaatatctaaaaaaaaatattacaaaatactaaaaaaaatgtttatcaaatatacttttgtctctaatataaaaaagttaaaaattaagtaaaatactcaccaaacatactctagaacaagagaaatattgttattacttatttttgttataatgtcaagtctaatttttaagaagagtatctattttattcgtaactgaaaattcaacacatggaggaataaaaaaaaaacatggtgagtaacaaataatctacacaatctaacaaggatattcatgacattcaaaacaccttttgcaatataacgtaagtctattgatattgatgacattgaaaacacctcttacagattcttcttcaaactttcctaaaatttattattatacagagtgagtcttatgcattaaaataaaataaaaatgggtatgaaactctaaaaaatatatatgtgatttaaaaaatatatacaatataattagacatgataacaaaatgaaattagaatgtatatggtttcttgttttcgtctcccaaaatccatcccaacctctattttcaatagagatgattttttatttaatgttctcatcgactattgaatatatttgttccttatttatattcgccctagaattttaaaaataaaataaaaaacataaaaaataatttaagaaagaaaaaataataacattttctataaaatagtgtcacccgtatatccaagaattttttttattactttattatatatatatatatatatatatatatgatctcaaatttctattcctattactaaatgaatttaagaatcaatcatcacctattaattattgtaataaaaatcttagaatgacatatttaattacaaagacaaacgataacaaatgttaattaagtaatatatattttacataaatgaaataatttatcacacaatatgaatacgggatattacatactcattatcgtttttcaaaaatcaaatattacctacatctgtatccatcccacaaagattctctggcaaactcagaacgagaataggatgatacccacagataccaatttatttgtcatgactaaatataatctataattctgcactatatatatatttttacataaatctttactatactttaaaaacattatattcacaaatatacacttacatcacatcaccactgtacaaaaaaattacatcactataaaaatactaaatctcatcataaattgtataattaaaatatccttatcgacatttacatgtatacctacaaatgaaatatttttaactattttcaacatcgtgtacagtaatggcatttacttacatctcatttataaatcatgctatatctttctttttgcttctaatcatgctatatatatttttttcccttctaatcatgctatatatatatattttatttttttttcttcttcttctaatatgctataacttagtaccactataccagcacgtttttttttattttattttatttatttttatatataagctattgagagtaaaacacttttttttttccaatttgaaatgagacggtgcatgaaaaggttgttgatgaatagaataatcaaaacaatcattttctttgtgaaattgtggcatctgaattttctggttcatttttatgcataacgtgcagttaacaaatcagaatcgttaaaataaaaaaaattaatagctcaaattctattataataaattaagtttaaaacatgaatttaagatatgaattttcttatttacatctgtcgatttagatttaatgattacattaatgcctaaataaacattgcacaaaattagttttttacgcttgtgcaaggcttgtatatcatctgaacggatcatcaaatttctttttgttattttgattttaaaaaaccatagttaaaaattaataattgttacttgaatatcaaataaaagaaaacatctctataattaattgttggcttattaaacaattatttgatattcaagtattgtttaacaagacagagtattgtttaataattttataaaataatcttttttttgttgtccatatataaatgaaaaatatataataaatattatattaaaaaattaaaataattattattttaatattctttttatatgacaattttaataagacaggtgaagtaacatctataaaatacttgtcatttttgtgtaaaaacaagcacctattatttttattgttggcgatatttttgtgaatgatgctttgtataaaatttcactttaaattcttttaattttttcttaatttttttatttataagaatatttatcttttgaataaataatatatgtataaataatgtaattttgtttataagatcatctaattataaactatcgttacttaaatttttttaaatatgtaagaattaaagataggtatgagaaaaattacaataatttacatatcttaatcaactaattgagctactcttaatatttatgcagagttatatgtttaatttttaattatttaataaatattgatataaataatagaatatgcaattatgcaaaatagaagtttcaagaataagacattatcttaaaaagtagaaatgtaaaaagtacatttaagtcatttaacatattaaacaaaataatcaattatgcagtttaattgattgactagacagtcatgaacttaataaacatcatgaatatcttctttaacgttctaattcttttaattttttaatatatgaaaaaggtgaaatttaaacgagtccccgaaaaatcaaaccacataaaaagccgagtgtatgtagcaaagcgaaagccacccaccagctcagatcagcctatttctccgttctgtttttacactctttccatgcaaaattcccccctaaatttctgggttttattcttgtccctctctttctagtccattcttttgttagaacactcttattacccatttcaggacttcacttttcctcatcattcctctctgtattttacatccatcttgaaggatctgtaattttcctgttttctttttcttttttccccattttcttggcacttttgttttcctgggtctcatattatctctctgtacctgaatattcaaccccctacccctctctcccccatttcacatttattaattgttttcattagactcacagaagagattttttgagctcaatacatcaaagtctcaagcttcctggggattcgtaaagggtctttaaaaaaaattccccttttgttatatgttttgaatccaacccttgtttcaccaaatcttgtttcacccattttgtttgcagcctctcctcacctaatctcaagcacccaggtccacaaaatggaccatttcacggtttcagactagtgggtaagttttcttatttgacaaggtctttccttttccaattcaaaagacaaccttgtctgaaaaccgaagccacgccaaaccccctttcgttgtggctatcttccattcgttcttgatctgacacaagaaaaaatgtatggaaccaaaagcaaaatagaccttgcctttgaataccaatcccaagttgcagttttgaggcccagtatccattccagaagagcaaatctgactgtgaaattccaagacctttatgggttcacagtggaagggaatgtggatgatgtgaatgtgttgaatgaggtaagggagaaggtgaggcaacagggaagggtttggtgggcattggaggccagcaaaggggcaaattggtatttgcacacaaccatagggcaaggcagtgccctcacatcttcattgaaattctcagcactggctaatgcaataactttgaagaagttgataaggaaggggatacccccagttcttaggcctaagatttggttttccttgtcaggggcagccaagaaaaagtccaccgtgcctgacagttattatgatgatttgaccaaagcagtggacgggaaggtcacccctgctacccggcagatagatcatgtgagcaactcacccccttttttttttcatgatcatcacacattgggtttgcttttgaatttgattacaattttcataattgtggttgtgggcatcaccctttatttgactagtgcttgcaggtgtgtggatcattttcaaatgaatttgatgcaggaattactttgtctagactttacattgtgtgacctgtgaaaagattttcagacaaaattttgctgcagattttgatggatgattgtgggtgttttcttttttgtttttcttcgaatgagcaatacttattatttatgaatgattcggagagttaaggaagatctaagagttgaagcattttttatccctgtgtttgtaacctttacaatcataagttctgttagccatattaacgtatcccatttaaataatttatttgttcttgattgcatggaatttaggttaggcaaaacgaatctttgagtaaatgctgattagaaagaaattgtaaattggggtggtatttgatacggtttgacatcagggtgtttgatgtgatccttaaaatggtgattggttttttatttttgttcgagaataatttgaacttgtctacatgttacattgttcattatatatatttattttgcttctaatcattctataagcatttttgcaggatctacccagaaccttccctggtcacccatggctggacactcccgagggacatgctgctctcaggcgtgttcttgttgcctattctttccgtgattctgatgttgggtattgtcaggtgggtttgctctggcctttcatttgtagttttgactccctgctcagtacatgaaagacaatgttctgatttgttattaaattgaaatttgatactacctatgtcttgtattaggtattaggtattaggtatttgaagggaaaatatcttgtgtcttttttttgagacgatgtggcttactctttgattcaatcaactctgcttctattctttttcttctgcaattagatattctgtcttctattagtaacatgcaggcctctgaatgcttcctttctaactaattaacaacatggtgtgactaaagcggggattagtttttatgttgtacctacattttgtttttctcaattgcttcagccactatatttgatgttttaaattttttaaggcaggtaaaatatagcgccacaaagtttgacaataatatgtggtttacttgaaaattaaaaaaattaaatgcatacttgggaacatattttcttaaatattgactctactataatattgctccagggattaaattacgttgcagcattgttgttgcttgtcatgaagacagaagaagatgcattttggatgcttgctgtcttgttggaaaacgtcctggttaacgactgttacacaaacaatttgtctggatgccacgtggaacaaagagtgtttaaagatttacttgctaaaaagtgtccaaggtaattttatttgatgtgttaactgtgtatcatatgtttgtttcttagtatcttctgaaaattgtagaaatggaaattcaggattgctactcatttggaagctttggaatttgatgtttcccttgttaccactgagtggttcctttgcctcttttcgaaaagcctgccttctgaggttagagtagtgctggaataaattattcattgaaaagctaaattgttccacatactaatacttcttccatgaatcagacaactcttcgcgtgtgggatgttatcttctatgagggtgctaaggttatatttaacgtggccttggcaatctttaaggtaccactagtgtagcctttttgatctttcttgttttttgataaacacacaaaatatagaaagagtttgctacattggaagggatgtttcaacaattgtcgccccaattgcagatgaaggaagatgaattagttataacccatcacgttggcgaagtaatcaatattctgcagattaccactcatcacctatttgatccagatgatctattgacagtaagacaactttcactatttcatatctttgtcatttgcactatcatcctttccatgttgtcacaagaagttttgatgcatttgttgaattaaactttccttgtgtttgcaggtggcatttgataagataggttccatgacaacaaataccatatcaaagcaaaggaagaagcaagagcctgaagtgatgaaggagctggatcagaggatcagacggctaaattcccttagaatggaggacaaatagcattttgctcttttgtccttttttttacttttttttttttggtggtggggggtggtacgttgctctctctaaatgtcgtcctctgctgcctcgagcagaatgcagaatttatgcattaccttaaattcttatctccctcggggcaggatgtttgtaggtcataaagtgtaaatttggatatggacacatcataaacttattaatttaatgttataatgtgtatcaacatcaaaattcactgctgtggtacttcaatgcccaactcatttttagcctgttcaattacattctcttgcttagtgcctttggaccatgaatttttgaagttctggcaaaactcataattttaattgtttaattattaaaattaagaatgccaagtgcttgtaaaattttgaaacatcaactaatggataatggacttaatattggtaattggttggttgcaagtcgccacttacgtgctttattcaataggtattcttgattcaagggattagtttaattggaatgtttggttaaagatgaaagggaaacatcaacttaaatgcattttcttacacaggaatcatttgcatttgccatttggtaagttcaatgacaagaagaagatcataacgaatatcaaatcgctattgctttaccaaggctgaataggaaattaatgaaatatcaaaatgacgtattacggtgtgtatgaataaatgcgatcacgtggtgtatggttggttgagcatagaaggaaaattgaaaatgttgtgatgggttcatgagttgtaagcggtgaggcggaataactaatttcaaagtatttttaactgataatttttaactaataaatttttagttggattgaagcttgggatgagcaaaaccctgctagagtcactggccaatatcaaagcatgagtcagttttggttttggtttattgcataacagccacaaaacttggaagtgatgacctatttatatatcactatatttattcctagtatttattttcaacatatatagcttaaaaatttgtggcattgttagttgtaattctatttatattgttgatattaatagaattgctatctagccaaagttacagcttggtgtaagcctaatcccccaaccaaaccagcgcaaaggtcaatgataataattttaactaataattctttcttcttttgtatcttgaaatttgaattgtgtattagagtttttaaaattatgttttaacttttattttgctgtttaacgcgtcatgacagctgagctggatttcaaggcggtgccattgcgtccttctttcactagtcatgtactcatgttctggtgcaattcctcccccgcacccccctctcttttttctttcttttttttttttttttttttttttttttttttttactttggggcaatcaaattgcctacttcaaagatgctatgattttttaaattcttgtcttaattatcataacaagtaatgctaaccagtatttcaagtttcaataacaaaaaaaaaaaaacctacttcaataatgctctggttaaagaatgaaaaatgaatcttttattaaaaaaattataatatttaatattaccaacatattaatattatgatttctaataaaacctttttattcattaatttcttaaccaatatatttaaaatattcactagcatgatcataataataataaaaaaaatcatatagtggacttaattactacttttcatctaacgacaacgttgattacaatgatatgaaatgagtttagatgatgacattaatttctgagtgtagtttgctatatatatatatatgttaatttgttatttttttgtttatacgtgagtttccaattattttgttatcagttcttgaaacgtgaatttgtatgttgatgtgtttggaccaaccatctacatcggttcagtacttctgctcaataatgacggacgaagaaagttgcaaagatcaacaaaagggtaaaatatttgtatttttataataatattagataattactgttacagatatatgaagcaagtacaactcttttgacttatttgaatttttatatttttaaatattaaacaccttattaataacattaatttttcttatctttctcttcttatcatattatattatttatgatatcaatatttctctttcttctctctatttctctcaaactgtcaattgattttggatgtttaaagacttttttcctatatgatacttgttcgacatgtgtcaacatttctcatcaacagtgtgtttggaatggttgtaagatgaatcaaaatcaattttgatttgactataaatatgaagcaacaaattgttgctttggaaaaatcttgttttcaggtagttttgagataatcactgtgattttaaaaatatccaaaaacatattatataggagatgtcaatcaaatgatttaagtgaaatggatgaaatgaataactacttgagaagttatctttaataaaaaggtgttacccgaaagaaattgtaatacacaggtcaattttaggcaataaaaagtcgggatagcacttattacataaagaacactagaaacttgccttaattatttgaatgtgtgaataagacttgtaaaagttctaatgaggaaagtaaatcaaatgaaggatagtcgaatcactaaagatgagatcaagaaaaatgataaaataaaacaattcaaagatgtggtcaataatttgtttataaacatgattaacaaaacattacgctacatagttaactccaactagcaagaaaatgctttgctattgttgttgcgttgttttatgcgagtggatgtataattttactattctgctggctatactgacaaccaagttaagaaaagaaaccaagaataaatctgcatttcgaggaaaacaaaaaagttggcatgaagatctccaattgccatagcatcaactacatgtattatacttcaacccgtatctgtatgcacgcattaataataatcttaacaatcagacggaaaataaaacgatgtcttcctcccatattattattgggaaattttgcatgcaattttcatcaaagaatatgcctaagtacaaaaaaattctaaagaatttacaagatccttctattatctgtggtttctcgtaacaataagctttctttcggactgggaaccaagaggttgacatcttccttttgccctataaacaaaaatgtgttttcccccgctcattctccattgagtatggtttgcttcaaccttactaacttaaagaagagctagcattctccgaagttgtatcatcaattgctaaattggatacctcgccaactacatctgtatcgctttcaccatctactgaagctttaggcgatgcttcaggggtgatgttttcttcaggtttcttcaggctccaatacatgatgctagcagttaaaatgagtatcatcttctggttgacctgttaaggttaaatgcataataagctaagagtcacacaaaatttctcagccaaataaatgcaagattagtgaagtatgtgggcaggaagctcaatgaacaaatatatttagataatagaagaaaaatgcttttccatgtacattatttatgtttaataaatgacaaactctccgttatatccaccagatcaattgttaaaacgtaccattccaattttaagatttcagaaacatcatcaatttctaatcctataaaagcatatctattggaaacaaacttcaaccaattaagtccatactccccttttcatagacaattggcataattaccaacaaaattatgtttaacatcgacaaacatacctcaattatgtcctcaggtaacaggaaaatggaacaccctagttttcgggcaacactgattatgtatgttgcattcaacttcttatcctcatctgcaattcatatgacataaatttgaccatttcaattgttgctcataagataacatattctcatcatattaatgtcaattgtcaaatataataatgcgtaatgtgaaattaaagagttgcaagcagaattctagccagcacaatttctcaatagaatgacagagttgacataccagtctcccctttagtaacaagactccagttgacaacccttggctccactgcactcaaaagctcaaggaagaaaacgccaccagaaagattcttatcctgatgaagcacaatacataaatatcaacaatgagttgtagtcatcaaagcaatcatcatgagcactgaaaagtccttttcttcattcaaaagcctaaataaaattacttttagtactattgataacagatgcctgtgatttttctcccaatatgagcagtacaaatatttaagactgataactgttataaataaatgtaaaattaagagtagcaagaactatataagcacacacgcacacacacataactctcaataggtggtttgataccttgaaactatccatttgagaagttcttcctgctcttttcactttattgtttgcccagtttagaatatcagcatcagtaatctctttaccttgtgagtgcgatctcaaatttctcagaagttgaagcatagtaaacctcatcagctgccacaaaaatgctgaggacagagaaaaaacagagatgaatatttcctacatataatggggcatatttttaacaaaataatgacaaataaaaatgttagaatataagagaaatatccaataatatatgtttttgcttttagtcataattttttttctatcgtgttggtccctcattcatctaccaccaaccctaattaacttgggttaaaggtgttgttgatgttgatgttgatgttgatgtgttggtccctcattattctagagtgtgtagttttagtccccaacttaagtgaatcaactatcaagatgatgtggctaacagtgagccaagccataattgccacatggctttattttatccaatatccattgtgttgccacatggctttattttatccaactgcccatcctccatattttacacttcatcttccaattttttttcaactatttcgttcattgaaggatcagaaataaatgttgaatcctatcaatctgataagataatcgatcttcctattggggtggggagaaaggagagacactgagacagtcttgaagaaagttcagatcttgtcctccttttcgaacttgaaattggtggcgtccaccacaaaaaatgaaatggcacccttcttgctgacctcgaagtagaagtttggtggagttaagacttaggttggaactgcattccatacagtaaaaaaaggaggccattgttgtgaagatttctttaagaggactgtttttcatacattgacaagtgagggatttgttcaaagttcacatgcgaagggcaagagggtgggatggagaggcgtggcacaataaaactgatgatgcatcttctatagccacacgagacaaatatatcaatcaacatttaacagaccccaattgatgtcgaggaccaaatgtcatcagtttggaacattgggggaccaaagaaatatgaaaatttgtattattgggaccaaaaaaaaacttgcaaaaatattgaactaaaaacatatttaaaaacctattttcactgtatatctgagtaatttagagtcttagattatctcaattctcaacatttccctatttccttatatttcaagatttgtttccttgtttaattaggaccatgatcattgtattactattttttttttgctgaaagcaaggtatctctatagtcgaaagccatgagactaatcctcagtagcatccagtcattctattattataaataagggttagagctttatgttttgtaccacatatattatatatcttgatttgtataacatgaatatgcaccacagagaatattctgatattcctcggtaataaatctcaagaacatatcctggctattgattatcttcagatggcagatttaactatagtgtagaagcataaaataatgtgttgacccatcaaaatatccaatgaatgaggacaaaacagaatttaaagcagatgttaaatgagagggtaccaaccacacaatcataacaaatttctagcactaacaaatcatcacaaagcagggaaaaaatgaaactcacccaataagagcttcttattcccttgtacaatatcattaccagcaacattcactaatgaaaagtttagttccttcccaatctttataacttggttgcagttctcaactttccgaaatggcatctttataggaggctttgtggccagcttccaattgacagatccaggtgaaaccttgtcaagaacttctaatagaacccatctgcggtaaaggaaaatcataaccagtagttaagatcaaggaaaatttcaaaagaagatgtaacttaaaaacaaaaatgataagaaaatggaagacacagatgatgagccaactgaacagtggaaaacttacccatttctgacatcctcaaaaacattattgacataagtggcaattccaagactgttaatccatagtctaaagcatcgttcttcccgagatgtctctgcatcatcagtcatcatctcagcaaaggacattttctggctgtcaactgttgtaaggccattcctacaaaagtacaagtaacagagatttttggatatatataaatgaaactcacaatctaaatcagctcaagatccaccctgtactgtatacatttctaacttaataactttcactaaccctacttacttgtacctaacaaatgaatcaaaccagtgagatccattacttattagtcattactcagaggcctatttaaggataatcataacaaataaaatgcataagcttaagtggcaatgttatatgatataggagccacacctatccaaattcatagaagggcagaaaacagcatgggttcttggaagcatatcccaaaagattcttattgttatattgtatgaatttacaatgaaataattagcacatttgcaatcccttaaaaagaaccatacctatgctggaaaatttgagcaacaaatgcaagattaagattaggtgacccctccactatgtcctttggagtaaggtatctcttgcaatctaatttctctgcctgctcaagaaccatgtttgccctttctgttggatcacttgtggttagggcagatggacctgccacttctggggcaagagcattaagcaagtaagcataagcctctccatcctgcgaaaagaagattattgtagatataatagactcatgcaacttagaattatactatatctcttaacaaatgccatgcacataaaaaactagccacacaacttatttttttttttgatcggccaatgttagttgttaaatgttagtttttttgttagtggagggattcgaacccacgacctctccctccttcccttccttcccttcttttccttttaccacccaaccaacctttttgttagtggagggattcgaatacacaatgattcagcaattggcatgatgtagggaaatatagtgaatcttttcctttgaaacttgtagatggttgtcaaggccagcagaatataacaagaagatccacagtttctttactgatttaaaaggcacaaaaatcaaggcagtggtgtgtataataaaaggttgttaataaggaatactggataatatttcatccatgtccagaattatttctattagagtaagtcagcatacaaagttagtaagaatttccctcacctttaggtcagaagagaagtttgtaacttgtttctcatatccagctttcttcaagtggaaattcatccatttcagtaagagcttatcaggtgctaaactgataagctcctccacatcctgccagcatgttaaatataatatagaggtttatttcaatcacgtttctgacatatgtaaaggaaagaaaaccattgtacatgtaaattacaaataagaggaataatattatccaatatcaccttgtcatcttccactaattccacaagttgaggagttttcttcagattgagatcagctaacaattgaatctaatgttgccaccataataaaaagttaaacaaacaaaaaagacagcaaaagtttacatgtcttaccaatgaaaatggtgtcaacttcctcatctgagttccatattaagcaagaaaagggggggaagtttccgtagtttaccttgattacttgcgaaatcaaaccaagtaccagatggggctacaaataaccaaacaggaaaattttcaaaaatgagttaaagtcggtcaaataaaaaaaaaaaaaaggaaactggaaacatggagaggggaaaaacaaggattgaacctactcttccttcaattaaatcctgtgtaccaatattaaccaccgtgcacccaatagccttggccgaattgaggccaagggtatggttctcattcctttcccatggattaagaaccttttttgtgttaatagctcgatcatctatggtcccaggaacagcaatattaataagcttgctgcagcaataaaataaacaacaaagtcagggaggaaaaaggggagacaatattttttaattagctgatattgagtcctgaacatctaccaaagaaggactccatcttttgcaagatcaaacaatgcatttgttgatggatcaattggaagaaactgactcatgaatttatcttcagccaagtagttgttaatatgtgcaacataagaagctttctcagattcattaattgcatgatgaacagttgttgtagctgccttcaggaatgaagaagaactttttgaaccaccatctttagctattgctcgggattgaagattcaaatgtgcctgccatccaatgtcactgaataagttgctaggtccaatataaatataattaatacctacaaaagtactcacaaatcgcggtttcatgttaggtgcatatatatgtgaagagtccaggcaatatgaacatcaaatgacattgtagtgtatattttccaataatttctttgagaaagcaataaacagaccattctaaatacatacagtaaaagttaaattaagaaacacatgaacacataggaggaattcagaaaccatgccttaacttctcagggggtaaaataaaaataaaaaaacaaaaactcaccctaaggaaggactcaaaatcaatctcttcatccatgttctgatatgactctgccaaggcatccttaatctcatcctcggtgaacagttcagagaaacccttcaatttcttaaaaataggtggcaaatttccgacagtaacacgtcccgattgagtcctttccgacacatactagaaagaacgtaacaaacatacacaatgcgtgttctgagtccgagattgtggtgtcgaagagaaaaaaaaaacatcagaagagaggaagaaagaaacataccttggatttgagggttcgaagttcgacttgggtgaactggctctgaagccattgatcagaaacaaggacaccgacgaaactagacatgttcgactcggttggagaaaaacaacaaacactcggaacaacacacggaaatcaaatgtttataagccaatagagataacacatttgttttgaaatcaaatcaacgatgcgtgaatatttaaattacaccgatccaacagtagattgcgacaaggctggcacgaagcgattgagaaaggagtattgagaaaacgtccctaagaaagtcagaaaaggagagcgagatcaaaaggattcgtcattgtatttgcgtggagcttcttcttcttcttcagagagagagagagagagagagagagaggcttgtgttatttgattgtgcgaaagaggaaatggggtggagagaaaaaaacgaaaggacccgcgaagaaagggaatgcaacgcaaatactatcgaatcaaacggtaccaatacaatgcttttctttctttcactcgttagactctctaatgatacttttaagttatttctataaattttgtttttttttagttatgaagttaatttttcattaagacttagtcaaagttcataatctctatataaaagtgtattttatgaaaatcaaattcaaattttttcttataaatttatcgtatattatcaattaagatacatcaattaaatttttgttctatgctattgcaagtgccaattgctaattgctaaatgatatatatatatatatatatatatatatatatatatatatatattaaacaagaatgacatgtggcatcaattcagaatccccacactcctctttccttcgctttcgtattgtttttatctattttgttgctttttcacaagccaaaaaatatctcatcgccttctacaattttttcgtcgttattatataaaattatatatatgtaatgttcttgatctcgtgctatattttaccataaagtaaggttcggttcaagggcaatccaatgaattcatttaaaaaaaattccgaactcagactcagtaacgacatttatttccgctttcctttatatacatccatacctaaccttcgcacgtttatctttaagatgaagatatttaagtatctgtttatccaaaaacaataaaaagaaagttcattttcatcgcaatcaaaccaaatacaagatttaaagaaaataacaattttaattcttatctaagaaaatcctattaatcttcttatttattagataaaaaactattgaatactttctaagttttcaagatattaaatacatttattttttatttcatataatttataaaataataagaatttttatatggaagatttgcaagacaatgtcacattaaattataagttattatgcatgtattattaattaataatctagttaattagtgttcttataatattggtggaattaaaaggaaaaaacatttagtataaaaattatagtaaaacacaaaaatattatgaataacataattttttattttttaataaaaatatttttactttatgttcattaatggtatgtttttatataaatgtgaaccatcatttccaaaactttcttatttttaaatgtcatgttgaatatgaagcatgttatacttagacgacgaagatagttaaaaagttaaaattgcacacaaatagaacggtgtgcatcataaaaaggaaggtcaactcttttctaaatgaaatatagccaacctcgtgagagctctaggtccattcatgtatggtccaatcccttaactatcacatgcaaccgctttgacatttactctagttgacctttaatatctatctaactgacattaaaaacaccttttattttcaaatgttacttcaatgttaagtttttcacacgaagttgtacaagtatttaacttctttactagtcacttatactattaatttgtctaatatataagatggattagatgcttgggatgacactgaacgaaattgaattctgattaatgttagccaagatggacttttgagtggactacaatttgagattttaagcgatgtgtcttctagcatggacgagatttttagtgaaaaatggtaggttcctgcaaaaagatattacaacagttaagttataaaggttcctccaaagagacacaatatgtattaaatatttagttgttaagaatataaggacatatccaaatcacacatatatgatttctcatcatgcacacgtttaagacaaatctcatcaatggttagttgcaagaaagcattgagaacagagtacattactcaatctcatgaataaaactttcattaaatgaacaacagttcaattacaaagtaagatttaatatttttggtccttaaacttttaaaaaaaattgtttttaagtctctaaacatttttttaataatatttttggtctctatattttttctctaataacatatttagtcccttcttgtgattttgctagtagtctagtgtctcccacacaggctagcatcagggaccctggaacgctatcgatgttcaacatttttttgcaattagagttcgaggagttggtcaagcgtctaggatgttaactggcatttgggaattgatatactagtgaatagtgatgctagaacagtgcatcgtttaaccttttcagcatttttaaacaccaaaaatttgttttcttacacgattaaagttgaaaacattattagaaattcttgattccaaaacaaagacaatgtattgttatttttatacaaaagttaacaaaactacttaaaactcaatatttacaaaaaaaaattttggtgcaaactcaaattctactagtttctatctatttttctaagatttcaatatttattttgcttttttctcttatttttttccttcaaaatcatgcacataaatttatcggctatatttataaaaatacttcctaacaaatcaaatagggacttattaacaaaacaaaagcaaaccataacagataaaataaatctcaacaaaaagaaagcagacttaatttttttaaaatatattgataaaaaagccatcatggtttaggttatgttgagttgaaaggagagaaatagtgtagatagaaataaaaaagaaaagtaaaaatatgtaagaaataaagttgtttgattaaaaagaaatatgaaagagataaagagatgagtaaaaataggtaaaataataataaaaatgaatctcattatttttaaaattatttctcactttatagtccctatcaaaccaaaaacactaatttctcaaaattgtttcattgttggaaatggacaccacattaatacttgaaatcctattcatgatttgaaggacataataataactttgtttatttttttatcaataaatattaatttgttagttttttcaaaaatgtcagtttgaggattcgaatccgagatatgtccccccttccttcattattcttcaaccgttggactaaccttatatattcttaacttagtttttttttttttttttttatttacaaactaatcaaacaaggagttgttcatttttttttgtaatcatgataattagaaaaaaaaatcattttgttagaatccccaggcatttcacaaactttgagattttgagtatgatataagactaattttcgatccgagacttaattacaagctcatcatcactccttcccaaaaaagtattatgtggaaattgatccatgatcttccccactaaactataccaatttgataataatcttgtttattattattttttaattacaaaaatgtcactttcatttgaataaattttattattttccctaggtccgatccctctgaaacaaatacttctgaaataatcttgtttttactttactcagcttctggcctggagtccaactggaacagtaaaggtccaaactccaaaccccatttgcatttgactgatagatgcatccagttctccaaaaagaataaaacagtgagcattagcaagcaaagaaaagatgggaggagaccggaagaccaactttggctaattttataggcatccataataaccctttaatattaatgctttgatgcagtggcgtttgtgcaaccctcttaagagttaaggcatacgtaaagagcaaaggaatatatacacttcaaaattaactcagcaaaaagccagatttaattccatctcaagaagcgtatcattgaaaaaagctcaacgcataacataaagctatagcctttcatgaatcatgatcaaccttaattaccataatgctatagattttaatgatcaatcttagataccataaaaaccttaatatacacttctgtctccactataactgttattggaattgtgcctgcctgagtgaaactgtactgattaggtgaaacaaagtcgtctagctcatacttgaaccaattttcaattatctttgtagttattttgaaaacgacattgcaaagatttgttggccaaaattactttagcaactcacaattatcaacatttctttttcgtcgaggaagtatcaatcaaatacagtaggctttataaacccaacagagcaaggtagcattggaaattgacttcaagacttcaacaccgtgcgagttttacttacaaggaccaaaaaactttttgtaaatattagagtttgaattatgaaatcgctaggcacccaaaaagctgtcaaagacccaaaaaaaaaatgttaataatacttacaagatctggattgaaaaaaatatatccttgattatttttttttcaaaacggcatctcctttcacatgccactaggataggaaaaataccgggtcttcaggagctggaacgttaaaaggtccaatataaaatcagcatctttaatttaatttcagctaccgtaaaaagagcttgtaaatcatttgatttccggaaacatccctttagagaataaaatcaactttcggaatagactttaactttaagtgacggcattaaaactctcaaaaaaaggtagataaagtcataacatgacaaccacataacatgacatccgcatgctatgagatttaacaaaaaaatagtataatagaagaaatcacattcatacatacattgaataacacttatgttcaaaaaaatggattcaaatcaaagcaagtggcaccaaatgtagatacataaacataatctaaattaaatattcaattggaagagtgccatcagaagagcaccagcacaccaaaagttgccaagacaaggttggcccagattccatagctgatgagcttgtgagaaggggagccatcatgagtggatgatggagatgatgctttgctatctgcactgtgttcagttggagaatcagcagcaggggcaatatcaggagttggtgcaggagcaggtgcaggaggaatatcagtgccaaaaatggcctcagggagtagcaccttgtcaacttgatatattgcaacaggatctgtggcatgaacagcactgctcaccctggtcttggaccatcctgaactaatgtgcaccgtcccagaattatcagtgaaattcaaagtgtaatcccctccggcaaatgtgggagtagagctggtttggctaaggcttgtgaactccgccagagaatagaaatgtggcaaggcatggaagaggatcacttgctttagctggttagaggtgaggttggatagggtagttttctttacagcattgaatgcactgtccttaggaacaaagatggtaattccttcttcagtgttgttggcttggttttggaaagtgtcaatcactttagtggactcaaggtatccaaggaaggtgtgaaatggaccagcaacactgagtaactcagttaggttcacgaagtccggtgccggggctggtgctggagttgggctcagagagggaggactagcagttttggcaaatgctgaactgaaaagcagcataatgttgctaacaatgaaaatcatagaaaactccatatcttccttggccactggtttatcctaccttgctatatcaacagtctctccaaattcctgtatgaaaagagctccacagtggttagatctcatcataacaaaacctaccaacctgtgaaaaagttaaataatgcgggaataaaaaatgaactcccagttcaaactcaatctccaataaataaaaaatcataaacccctcaatttttttttttttacctaaccttctttacatctcagtaaaaagttgtcaacatcttactaataatagactaacataatggctggaaccagatcttacaaaagttaacatagaggaacaaaagaaaaataataagatattcaacagaatatgaaatgcacaaggtaagatctatgaatgcgaattgaaccagagcaagcagaaggaaatgcagatccgagtatgatatgaacactataacaatttgatagaagcgaataacacttaaaatgtactacttttgcttcacactactgaaaaatgttaaattcagaactcccagaagactaaatttccaaatgctaaattcgagatcagacagacacctaatgaaatgaatgttgaaagattttctattttcttttttgaaactatcaatcatccccccccccccaaccagtgccaatggaatgaatccattactagttcattttcctcacaaagtttctaacttgttgtcaaacccaagccaaacgtaggtgagttagacttagaccagtcaagtacacagtgacagaattcacataatttcatgaaccccataatgaaatgagacagatctagactagctgatccaaaatcacaagcacccatgagacaaaaatgacattcaaatgtgaaaaggcaagaaaagctaaaagtttgcacctaaccataaattgagtgacattcagaacaaaagtaaattaaaggaaaggaaagatattgagatagaagagcacacagacatgaataagaggaattcagagagagagaaggagaatgtgaaggacgaggaatgagaatggaaggagggtatataaagatagaatggagggtacgtataccagctggaagggtattagtattggctacagctacagcaaagagatgcttctaacttgagggtggttctttggtgaagacatattatactttaatggaaaatgcttctctggaacacacttttttctctccttgtatggtggcctttccatatccgctttaactaaattacttctttaacccatcatagaccaaccttgcactctaccccaccattttccatctccccattttatcatctagctaaccgacatacataaatggtttctacttcatttctagtttatttattttcatcaccaaaaatgaagctgacgtttagccctccataccaatgcggcaatgctaatatccgaccatgctgttcacatgccccaaaacctacaatggaaaagtattttttttctaaattaaattatcgtttaattcttgaaattgtgtaactctatgtcgttaacttttttaacgttaaaagattaatttgatattaatttatattttttaagaatcaatttaacattaaattatataataatacataattattatattttttacatatttaatttattcttttgaaaactaaattgtcattaatttatatatctagggagcaaaataatcatttacctttgatatgaactattaagtgcacatgactacaatcaaagatgtggtgactagcatgaaataaaataaacttgttttctctatataaaaaatgcacggagcttccataactatatgaaaaatgaatgtgagatcaagttttttgataatctcttccttgcatttctctttaactctttaagtcctcaaactatattgtttcacaataattaattttttttgtgtcaccatggaacacatgaattaactggtgaggtttgtttcaatttaataaaaaacctcaagttaaagttttaaatatgaaattacggaagagttttgtcatttataatgatattattcaactcaaataaaattactttttgtaagatatatgtgatgtaggaaaaaaattgtgttaagtttaactaactaaattttgttccataatattaaattaaaacttattatgcttatggttaaagttcattactcataatttccgtataccatatgtatataattacggacattatggatgctgggcaaaatcatattgaataatcttttgtaggttgtcaattcaagacttgtaataggcttagtgctcaagatttattaaattgattgattaggcttgtgtaaccatcaaggcatatataggaccacgttttgattttccaagacactaacctgtctagaaaatcatcattagatgcaattctaacggactgtagcaatgtttccctataaaaaaatggactgtaataatgttagaaaaaattatgtattcaagtttaatcagcaaatgtaacaaaagtggttagaaaacggtaactaccgatggataaggcgagtactgctagcctaaaaaataagacatcggtcataagagaccaacattatggtgttaaaacgagttaaatccaataatttgacttatataataagttcaaataggttgagttcgactgggattttcgtaactcgtataacccaacccatttaatccatcaatcttttaaattacatttaacatttatatttttttatgattattggttaattatttatttgatttactagtttaataacatgtttttttaattatatttgaaaatcaaatttggaaaaaagttaagacaaataaaataatttatttatttaattttattttttaaaagagttgatggtccaacctaacccatcaagaaaaacttaatacaattttggtcttcttacttagtttcaatttctcgttttttacatcttgcgccctcataattttaagtattcccaaattacccttcttttttctcttaaaccttatttcctgcacattcgactttaaacccccattatatctcacccttcattcccttcttgtgtcttcctccttcttgtacttttttttatcagatctaatttgcggatttgttaatctgtaatataactttttttctcttatgaatttgcttatccggaattttagtagcccaataaaatagattatttttccatttttcattggttgaaaagcccggcccacatacttcaaattacattcaaaactcaagcaaccggactagcacaaagattattgtgtcccaaatttagattggcaaaagtaatgcagctaagaagagatataaaaactaaagaagttgacaactagggaacttttattgggaaagttacaaaagagtcctctttgcctctgtctattttagtcaataccaaaaaaaaaaaattttagtacaaacatgaatttagtacctaacatatatctgaatttctcaagtcaatacaatagaaatttgacaaaatgaataagaattactattgcagatgcaaattgggtatattgccatcttcgttcaagcccattccttcctaatatcaaaagtatagttaatctccaagtagcatttgttgtcatcatcaagaaactgcaaaaagaaaaaatatgatagtatatggttgtatcattaattcattatcatacaacaatagaagaaaatacaaatgttattctatcccatagtatgcagtgaagcaccgcttcaaattttactactatgatgatatgcaatatatactattaagaacaacacaagaagttggtgaccaacaaacctcgattccactactgaccgtaatccatttacaaggaaactaacaccagaatatattaaattaaagccagacaatatggtacttctaataaagaaacattacaaaaaatgaggaaataatgaaagaagtaaatggaaaattatggaagtgataaactgaaatgacaaaaccatgataaacttcgaataaaatgattgagaaccctttgaatcaagtatagtagtgattaaagggacgaatgaataataggtagccccacaccccaggcagatagtgagccgtcgtgactattttatgcaacatttaagaggaatatatataatccaattatgaacctgtgtgtgtgagtgcatgtgtatatttgtacaatcaagttcaacgtatttagaagtaatattacctttgatcttgcagaatatgatcctcttgcaaatagcccagagggagtggtttcttctggcatctcatgtgtgtaaggctctgcctgagggctgaaagttcctagcatctcttttgagctatccactgaaattagaattgttgtaagagagtgcttgatcaagtttttcatgtttataagtttaattaatttgaaatagatttggcacaaaaaaaaaaacttacctttgacaccagtcttccaaacagtattggtgtatttcaagccagacacaatattattgctcacatggaaggtgaatttcaagcggtaatgactaccttctttaagagtaaaccataaaccctttggattcccattttcaggaatggaaagaacaatgtcatctctatcaggagagatgatagacaaacaagtaatattcacttcagggtccagaatttctggaaataaaaagattaacgtaataattgatacaggtttagaaaaaaagaacatataaaagaaataaaagaaatcttctgattattgttcacaaaacaaaaatcccaactactagttttgaagttttaatggattatagtgaatattatgatttctcaaactgttaattacatgaacagaaaatgccaatttgcatgttcctcatgttaatcttcctgtagttgcataagtcaacacttacatttattattattattattattattattattaattaaacagtaataactaataacatagccttatattaattttagaaataaaatataatgtaaatttgaatattataagctttcatgcttgcgcaatagtccgaccaacttgaacagaataagtcaaatgtctaatgtgttctgattcttctgaatacaataaaaaaagaatgcttataattaagggaaaaattaattaagtgatatataaacctgcagcattgttcacatccacacttccaaggagttgttccttccatcttcttaaactctcatcatcctatattaatcccaaaattcaaccaaaaaaagaaatggaaagaaaattaatcaataaggaatgaagcatgaaacatgacctgacgataaatttcagcagacacagagaaacaaaccttatctttctcaaggtgctctttaagagtgcactgaggacccaattgtaatttggatccaacttcatcctcctcatcttcagttgcatagatagaggactcactcacgtgcctgctcaagggctcgccttcacttttataatgttcttcatttgcatgatcacttttctctccagtttctttgttttcatcgaaccccatcttcttggaacttgaaacagctccaacagggaaggtggttaactcatcaaccgtcacagggaacaacaataatatgaccaaaaaatcccaacaaacaaacaaatggaatataattaagcaacgaagactaagtaaggcaacaatgggtaaaaataatgttttgaagggattagtgaaactgaaaaaaaaaacaataatagtttgtgtctcacaaaacctaacaacgaccaataaccagaagcaaaaaaaggcaagggatgtcaaaggaaaaatggcttgtttgtcttgttggcaatgttttaggaagagacataaatttatggctaattttcggaaatggtcatgtggtgatccgaaatctttgtaaatgttactgacatcatgacatggttatatatattgactcatctgataaggagaccaaaaatgttttggtgaattttcatttcaattttgtaaattttaggattaaaaaattatatatcttactatttactgacaaataagcatcactttgaaaatataatctttttaactaagatgatatacatgagtcaatgaaaaatacagtaaaaaaaatgctcttaaaatatttttgtaaatcttctttttatctttttatttttatcgaaatcacttgtgttgctatttattgtatgttaagagtatatttttattcaaataatatataaaataaatattaagagagaaaaatcatgatcaaacatttattttttattttcaagtctatttttcttatatgaaaaatataaattcaaaaataatataaaaataataaacaggaatatataatactatgtaattaattgttaaaaaattatttcatttattgttgatatgatgttaatatgtaattttcaaatgtatttattatcaaaattaaaatttattttaaatttgttgacatagtataatttttattttatatatatatatatagttaattgttttaaaataatatttttaatgattttaaagatattaattttaattatgtgatattaatgaagatttcaattgattaaattaatcgcatcataaattgaatcatatcaatgattgttgaagttaaagtttcgatctgatgatgtaaaaatattgaaataaagactatataactgaattagattaacaatcatcattatgagttaaaattttgattctactactctcaaagtttcaattgaagtttagttatgtatgtatgtagatagatgaacctaatagctagtgtaatagggatattttgagaaggtgagaggaaatatggatattttgagaatataaaagaaaagagtggagagagtaaagagcaaaaagagggtgtcaatatcatgggcatttccacgcaagatagcagacagcccactaaactacattcaaaatttatcaaaggtatcatatgaaatgagacctaaaagtacttgtgtcaccgattctcatatactctatcataaaaagtatagatgataatttcattaaaattatttacttgtggagcataaaagtaaaaggttacttacgggccttattttgctaataaaataaacattggatttttttttttgtttcattttttgttactctcggattgcaaaaatgcagtcatgatgtcagcaacatattaagaaagatggtattgttgcctagtgttttttactaaggcattatttgcaccttttcaaacctcggacaaacacattttgcaagaattttttttgtctgtttccagatttacagctaccagagttactgttatgtgtgtggttgttaggtaaataattccaatgtgaatggtgatgtgatacacaaattgttattcttaggcctcatcattctattttggagttggaggcaaacaatgatcggcaattctgtgctgtgggttaaggtcttaaggattcttgttacgaatgttatgcttaagatctcgaatttaggacataaatgtaaataattttttttaatttaataaagttcgggtagttctcatttttatatgttgattgttagtttgatggaattgaattagatgttaattctaaattcaaatatatatatatatatatatataattttttcccttaacatataatatataaatgtactcttagtttttaatgtttttatttattatatatatgtgcaaaaattcatcaattttgtttatgattaatttttatgtgagaaaattttttagtgagatatttttttcaataatttttttatatatatttataggattcaattctaagattttatttaaaaaatcaaaacttagttcaatttggacaaacataatgtttttaggctttcaatataataacttaataacttaattcatatttttataatttaaactgtgttaaaagataattggcaatttattataattacaatgttgagatccttgtgggaatgcatgggaaatcggagaatggataataagaaacaaaattagcttaagaatgaagataaatgaggatggggagcagagagacacactctattcccttcccacgcgagtgccatgccatcacaattgtataaatagtagtgtgtgacaaaactttacccgttggcaaatagcacacacaacatttcaatggcggcatgattatgcatctattttgattttgccattatagtctcattctcgtaatcacatcagaatcaaaaagagaaagcagccacaaaaccactactacgtggtaggtgtaatctgaatgggcccagatatgaatatccttgcagggcccactatgggtccaatggcccaccagccgacaaggcccagatagatagtttaggttttcgtcagggtctgatctggactactacctgctaccgtacggtttcttcttcattaatttatttgtttgtttgtttgtttgggatcgatgaaagatttcattccaatgcacacccaaaaaataaaaatataaaattattgctaacctataaatttacagtttacactttacagcgatgctaaaatatttacaatttatatatattcataatgttaataaaataatttataataaatatctggtaagtcgtagttattttcagattggaaacctagaatcgtgatttgaattaaagataagtttttattcaaactatgattataatttaagacttcccaaactaaaattattttaaacctctcaattttgaatacaaggttatcactccattgacttaggctcaaggatcgaccctaacataatgaaattggatcctctcttgctcctattgtctctccagcacaaaaaataaaattagaagctcaaaaagaatgaagagaggaaaataaatgatgaaaaagtaaatagaaagtagagagatagaaagactagacggaactagagagaggatattggcaggagaagatccacataataatctaatactcccatctcacatatgtaaatttaattttcatagctaataatgattatattatattcgaaaagatatttcaattaatttttatatgtttttattgattgaaaaaattgtttaactgtttagtaaataagttttttaataactttttaataatttttagtatttattgagttgttatttgaagtagcattttttaaatcctaacttttaactttttttatatttttattctcttccatatatttatctaatttcctattacattttcaaataaataattatttttatttttatgttattttatacatttgagttacttcaatagttagttttaccaaattcttataaattcttataaataaaaagtgtaaaataacaataaacaataaaatcatttttttttcaaatgtaactaagaaatttgatatatatatatatatatatatatatatatatatattaaggataaaaatgaaagaaaatataaaaaactaaaaattagaagataacattttaaaaaatgctacttcaagcaatctttcaaaaaatgctagaagctactaagtttaattattggataatccaataaattttttagctaataattttttttttagaaatgagttgaaatgttctatcgaccatatctttaataagttaacatttcagttatcaactttaagcttttgactaaattttcaaataattttattgaacataatcaataattaaatgattattatcatttccttacaattattataattcttgttcatttattttttaaaagcataatagttttttgttacgaatattatgacgcttttgatttcaccagtttgtgaatatgatggtacataataaatattttattataagtgaaagttacaaattgatatccaatcaaatctttctatacatgatttgtactactttcgtatgaattttttctgccattaatttttttagtaattttttaaagatattcattcatgttgtcatcttgtcgcccttataataattgttatcaattgaaaaagttatgacaagtaactttgtgcaaataagaatttagtcttcaattataataagagatcaatcttattatattggatatcagataagtatttggcctagtcgaatattcaaaaatatatttgataaaacttttatagtacattgaagtatatcctctagaagtgttaggtattcaaccatattgaatatcgagacattgttgtttccatgttattcaaagattgttatattcatgattgctacccaatcactattagtatcctagccttcaaaggttgttttctgttcatggcgtgccaagtattcggccatgttgaatacccaaacacttttgttaccctgattcccaaaggttactttctctactcatatcactgtgaagtattcggccatgctgaataatcaggtactgtatcacacactatttctataggacaatatgcgagtattcgacatgattgaacacagaacactctcacctcaccttatttaaaggtaagactatctaaattagctaataaacaagcattattgaaaaattcaactctttaatgataattaaagatacattagctaaaaaggtaatattgagaaacggtacataggttcaagccccactaaagtgtgtataaatagttacatgaatattgaggtataggtaaaattactgttaagtcttatttattactcataattattgttatcaaccaagacctcttacttgaactttaaagtgtcttttgtaaataccctatcatttggattgccgaacattatttgaagaagaaaggagatcatctaggagaattacacaagaagaaaaattatctatctacccgttataatttgagtatcctgtcattaaatttctcaaagatgaatttgagttgtacataagaaatgtactacagtattatttactgttaaattagcttaaagaaccgtttgttttaaggacattgcactttttattattttacaactaaatcatgattgaataaccatgcattgaatttggtaaatccccctgtaaatccgactgcacaaagcacagaatgttagaaccaaaagaatgatgatctcaatgctccattattcagcctcccagtagaggagatctgaaataaccattataaaataataatataacctcatctctaagcctttgtcaccattattgccaaacatgcttattaacattcagtgaaggatgcgtcaaatcccaagattcttgaagtgtccccacctctccgtttctctgatcaacttgaggcctttacctctttataaaccactcttaatgctcatttcttttcatcaaaagcttttagctttctatatcactctcaactttgcttcttttcaatcagttacattttctttggtattccaatggccactgtagaggtaactctactaaaatacttgctactctagttcacatggtagctcagttcagaacccgcaaataaattcccttatgttaattttaatttggcatcaatttcttttattttcagtttgatctcaaccatatacttgcttcgttttttttttttttttaatatatatcatcatacccttcaccgaccctaattaatttggattaaaggtgctgttgatgttgatgatattgatgatcatacccttgcttctgtgttatcttagacaggaagttattcatttctttagcttcaatactccaaccgtcattttttttcctgaaattcttgtcacctaattaattaaattcagtaaaatgacagcaggcacttggcatcttatcaatatatatatatatatagctttgtcaaaaagagttcatatacttgttttcctcagaaaattatatagaaatgtacaaagtagctgaatgcaaatttcaattagtttgtcatcagacagagaagccacacgaatcatatgccttttccatcagtcatatttgttagagtattaaaagacgtattaaatctatattaatctgacagctttgaaactttatccttatataatatatattgcaacaactatgagaagtgatacattaaccaatagttacaaagtaaagaagagtaagaagtgtttaaattaaactgcatgtccaccaccttattaagtttttatctcagcagagttcaagttggaattctaataaacaaaatatgaattttcatctgaatatgtctttgtctgttggaattcgaaattgtaggttgtgtcagcaaagtttgccctccctgaggacacaaaagaggcatcattgaaggctgatgaggagaagaacacagaagaagtttttgagactccaacaccagcaccaacaccagaaactgtcgtcactgagcaaaccaaggaggaaagtactgaggccccacaacctgcagcttcagaagacaagccctcggttgaagttgtgcctgaaactgtcacagaagagccaacagttgagaagacagaagaggaaactttgaagcaagaagctgctgtggaagcaaaagaaaatgctgatcctgctgaggttaagacaccagaagctgcagaagtagtgatagaaacacagaaagaagatgttgctaaggaagagaaagaagctgaggctgaagctaaggaagaggctaacacagaagccccggcagagaaaagtgaggaggtgaaagaagggtcagctgaaaagaaagacgaagaagtgattgcagaagcagaagctgagaagagtgaggaggtcacagtcacaggcacagaggctccaactgagaagactgagtaaagaatgtgaagaggggaaatgtgcagtttatgtgactgttttagttgcatcatgccataatgtgttgttgctccatgtcttttcttttctttgattagtgatctaataaaatgtctagctaggaatgagtgatgacccacttaagtttacgaatgccaaccatcagtacaaggaccacatggcatgtactatttcgatctgtttatgtactgtgagctctgatccaatgaattgaagtatgttatggtccttattgtgtgattctgcatgcagggtaactttctttgttcaaataaatatgtagattatttatatgatttgttcacgtcacttagtaactttgtgttccatgtcgttggccacctgcccgtactaaaaattggaatgaacctcggtcgcgggcatcatagtccatatagatatatgaatcaggttaagaagatacatccaatataatgaggtgcatctaatactggtttgcgagttttaccataaaactagatatggatctgttgtactggcgctttaaattattttcctgtaaatgtctctttcatagtagtaatggaatgcataaatgcgagattaaaagtagaggtaacaactactacttagtgactgccacttagggataaaaataaagcaggctgcaaagtgcaagtagatctccatcgattattatgacatgagggaaacatatgtaccttcacacaacattcaatgtaagatcaagacatgcaagtccttctcacatatatatgtttaatttatttttatctaatatgaatccgtctaatagtgaagagtttgaataattcacataatatgttagagatttaaattttattgttatcattgtacgcttaaaaaaatagtaaaaatagtatgaggcttcttcactctaacttactactcaaacacatttaggattaatttatttaaaagcatgttttgtaaccttagagcaaatttttttttcttaagcatatttttataggacaaccaaacatgactaattttactctcaaacatatttttggaactctcctaaccaaaattcaaacatattcaaacaagaggacttttaaatatgttgtatgtagggcctactgtcttttagacaacatatttataatgttatttacaccttcctttttgttcttcacagcttctctttttgtcattttcccaaaatacccttttttcttatcttcacaacttcacttttttttaatagattttacagaaattaattttcataataaaagtatgttctagtatatgattatagtttccaaaaatatttttttataataaattacaaatattattttggattcaggttcaatgcgttattgtatccctgtggatatttccctttctaaccatacagttgctagtagtctcactgtaattcccaataggggcgagcatgcaaagagcaaaataagagtagaaatagcatgagcctgccttgctttatctctttaaactgtatgggctgaggtgagtttagagtagtggcccaggaaaataacaatatcccttgctaagaatcttagaattaaaacataataaactaacaattattcttatcatacgggtattttttttaatttaaataaaactttaaaatgtggaattaaaaatttataaaaaaatgtatacaattaatttaaataaataaaaatgcaagtaatttttttcgataaaaaatacaaaatgcaagttatttattcttagcaaaaaaatcaattttaaatattattttaaagttaaataactgattgtttttaggtgtcttaacttcagtaactggtatttgaatattggatatgttcttccccatatatatgaacatgcaatttgagccagttgtctgtctctgtcatccaaaagctgaagcggatagagttgagttgagtttagtgctgtgctgtgttgtgtgcgtctttaatctatatagaatttggctttgtgagagaaaaatggtatcttaatttgttttggaactcagcaatggtaagaggaagagatgaaatgtatgtggcagcaatgcctcgaagggctacaaagggaccaccccagtaagctccctcagtttctgggatttccagcatttcatggtaacttatgttgataaaaatggcaagagtaacataataatataatatatgagatggatcgtaacataataacataatatgcaaacgcttagttcagatttgttttgtcaccgataaagtattgatgggtaacttatgttgataaaaatggcaagagttaaagagaccgttgagacaaaaatgagagatggattttgaaattggtttaattactttttttgtctatttttttctttcaatttagccctttattattaaaagattcaattagatcctttgaaataaattatcatgatattgatgcatcatatattcaataattttttttaagaagagtcttaactataagtactcaatcaagtagatcattttttttttcagtaaaaaaaaaatctaaatatattacaccttagttctaagatattctagtaaaatatattagtcaattataaggtaatccgtgagatattcaagtatcaaattctaagagtacaagtaaaagtcatttttctttgaaccccggccaaatcactcaagaaagaagaaaacttatagtcaatatcctcgatttccattattaaaggtgagaagatttatgagaattgttttcaatttgagtttaatttttatatatagttagtaccaaatattttacactggcaatcaattaaaaattataataaatataattttaaaataattattataaaaattatcaagcgtatcatataattaacttataattaaataatagtataaaagattacatgaactaatttctctgttagtttatcttaatggatgaagagctatacaacaacacaaaagtctaaataggcgagctatagggatatagtttagaaaaattaaagagtcagctcagctgctgactttccagtccttcaaatgcatttttaaagaattgatttgaaaattggatgtgacaaataagcattgccaacttagagaaattatagatgatcatcctatgcttatgaacacctagtgaaaaaaataaaagtgaaaaaagtataagttttatagataatgtggggagaaatgagaaatatttgttagatgaataaaaaacattgaacattcatgtatcatcactcgtaaacttgatagaaagggcttgttgaatatacaaagcatagatattaactcattctcacaaatattaatcgttatcgtaattagatggtgatttttttttctttctattttgtgtgaagtatcgtctgctatctaactttacacactagcttttcaatcctaaactatatgcatggaaaatactgcaattcttacgcaaacttttccatatggccaacaagataaaaatagtcaattctattttaggaggcgcacaccatacacacacgtgtgtgtatacatatagtggcggatttaggattctggatcagtgaggacaatttatttaaaaataaaaattgataactatcattattatatgagatagttggattcaaacacgaagataagaggaataaaatatgaagttttaagataaatatttgcattttattaaaataaaatggtacatttatttactcttacgtgtgaacgggtaaggaggttcaaataaataaaattaaggggttcaaaatataaaattatgaggtgcaaaatatgattatttttttgcattttattaaaataagatgatgtatttacttactcttatatgtaaactgataaagaggtttaaatacataaaattaaggatgtaaaatataaaattatgggatttaaaatataatattttaagacaaatactagtgatttattgaaatgagaagatgcatctgcccaccctcaaatgtatgtaggtccgctgtgtatatatatatatatatattttatatatatatatatatatatatatatatataattgattcttttaagataattgcagtcaacaatcgcgtcctgaaatgatcatgcagcagttttgaagaatgcagcctacccactattttataaagtttgtcatcaattattttatttcctggtgtgatatagagtaggtcgaaatttgcttaagtgatcaataatcaccatgtcctgttaataaaaaacaaactactatttagagagataaaaaaaacaaaaatcacggtattttttgttgaaagctaaaagccaaaaatattatgttttcaaacgtctgaagcaaaattttcgtaatgaaaaaccatgcctgtgactaaaaaaagtgacaacaaacattccggattaaaaaaaatagcaaacaaatcccccctccgtcagaaaaaaagagaaagagtcaaagaataatgttgaaatggcttctttattcaataaaaaaagaaaaaaaatatatgatatggatatccattatattatttaacacaagagaaaaaaaattatataataaaactattgatatcacaagaaaaaaaaaagacaaaagtaaataaaaagattagatatatatttagaataatgagatgtttatatattgttattaaaaaataatataatgggtcggtagaggcataatccacctaacctccaattccattgtcaaagttggtatgcccaaatagctggaattgtaattggaatttgaatagaatacattacatgaagcaatgttgttgttgttgtataaaaaggggctttgtccatccatcaaccgcattaacagtaatacaataatacttattacttttccatactttgagaagctacgtacttacaatggctgctgctattgaaatccccacaatggtgtttccaaactcctcttcccaacagagggtgccagtggttggaatggggtctgcccctgacttcacatgcaagaaagacacaaaggaggctatcattgaggccgtgaaacagggttacagacactttgacactgctgctgcttatggctctgaacaggctctcggtgaagctctcaaagaagctatcgaccttggtctcgtctcccgccaagacctcttcgtcacctccaagctttgggtcactgataatcaacctcatcttgttgtctcagcattgcgcaaatcactcaagtgagcaacttcatttaagcacaattttttttttttttttttaccgataaatgttacttgttagtttattagtttttttattagtggagctgagattcgaagttcgaacccacgcctctcccccctttccttctttcttcaccactaaatcaaccttctaattccccacttgtaaagatttatatacaacttatgtttaacttataactctgtctgattcattttacttcaaatatatatatatcaatgcttttacttacatcaatttttgtcgtgcagaactcttcaacttgagtacttggacctgtatctcatccactggcccctgagttctcagccagggaagttctcatttccaattgaagtagaagatctcttgccttttgacgtgaagggtgtgtgggaagccatggaagagtgccagaaacttggcctcaccaaagccattggagtcagcaacttctctgtcaagaagcttcagaatctgctctctgttgctaccatccgccctgtggtcgatcaagtaagtctctctctctctctttttccgtgtgttgtattttgttttgtttatgggaatgattaatgataagattaattactactgttacaggtggagatgaaccttgcatggcaacagaagaagctaagagagttctgcaaagaaaatgggatagtgataactgcgttctctccactgaggaaaggtgcgagcaggggcccaaatgaagtgatggagaatgatgtgctgaaagagattgcagaggctcatggcaaatccatagctcaggtttgtctgagatggctgtatgaacaaggtgtgacattcgtgccaaagagctacgataaggggaggatgaaccaaaatttgcagatatttgattgggcattgacagaagaagatcatcacaaaatagatgaaatatatcagagccgtttaatcagtggacccaccaagccccaactcaatgatctttgggatgatgaaatataattaaactcctaaactactactactactacctcaaatgtttcatttgcctcggtttgcattttataattcatggcttcatgttcctttacattacaccttaatgagctttcttctagcaagtaataaaatgtgagaccatacaatacaacaattatagatttgtgaggtaacaataaggcactagtgaggttttttttttttttttttttaattcgtgagaataaaagacattgttactagatttataatatctcacacacttttatttaactaatcgctggacttttctcttccttgatttttctcttccttgatagaaagtatttattgtatattaagtatatttttattcaaataaatattaagaattaaacgaaggaactctaaaaactaaatcatatccttagtaaattgtgtgattttaattctattattacacaattatcattctattactatttaaatattttaacaataaactattataattggttgatattttcgtaattgtgaaaattaagaatataaaataatcaagaattagagatacaaacttgaaaaatataataattttttttccataatccgatgatccaaaccattcccaactttaataggattggaaaaacaaagtttcaaaacccaaatcaaagcaacgcaatccaatatgcatcattattttgtattcaatctcaccctaaacctaaattaattcaacccgtgaatattcctacaaaaatgagcacgaagaatttgaaatttgaaattctacagttttaggtaattaaaatacttccacaaattactagaatttcaaatattttttaaatataatatccaaacaacatattttaattataaaattctctcttacgttgaattgctcatttaaattttcttatccaaacataccataaaatttacaattttgactgttctaaaataaagaaaagcaaagtaaacaattttaccaattaatgagtaatgtttcaacacatgcaaaatttgttatacatgtatatataatattaattattgattttctcattaattaccaaaactactcattttatcttcttacatgaattgctcattttaaataaactaaactcaaaattatttatattattttctaaaataagttactcaatttaaataaaccgtatctgaaagtttaatgatgatcagttcttcttaaaaagaaagtgaaagatatacttaaggtaagtctctggatcttagacagatttatgttttcaaaccatagatatggttttgatttttattttgggtatattttgacccgaaatgtctacatgcactgaacttttatgggttcactcaatcagtaaaacgtaagtccataggtcttattagatagctttatgttttcaaaccatggatatggatgtgcttttaatttttattttaggtatatgttgacccgaaatgtatacttttcacgggttgactcaattactagaacagtatattaatttggataaatattagagacaacttatattttattttaatataatagacttaaaagcgcacattcaagtgtaggtgtctttgagattaattatcgcatcggaaaaaaatattttttttatataaatttataataacatatagattttttttaaaataacataaatacaatttttttcataaaacataacatatataacaaaaaaagtattctgaaaacataatgaatacagtttttgacaatcaatcaccttcaatgaattttattaaattttacaaaattatctatgcactagcatgttgatattaagttttaaaataacatataaatcctacttttaattttatttgcaaataaataattttaaattttatttcacaattatgtcaaaatattttttctcctaatatatttaaatatatgtattttaattttaaaattaaatacctctattaagtgtaaaaatagatatatactgtatattttataaatatacatataaaaatgaaatttataaataatataatattaagaaaagaagaaaggtaaataaataaatttatttataagtagacatgtatgagttagttgggttaagtagtaagaaaaggttaaagagtgtcacatcaaaatatcaccatcaacaccaccacgagtccacgacgttatgcaagaaaccaactaccacgatcatgagttgacttgggctacaatgaatgttataaaatccggtttagctctgttggtcgggtccaactaatcagaatctaataacctaacttgatcagttttactattgaatgttcatgcatttaagtcaggataacccgaccaaatcagacccattttgaaaaaatctggcaatccgactgattctacaaacccggaccgggttatgcaaaaaaaaaaaaaaaaaaatggaccatccacgccaccatcttccccgacttcgacgcttcccacctcttcaacctccacccctccgatgccacccgcctcaccctcttccccgccgatctcctcgacgccgccgccctctcctgctccatctccgcctgctccggcgtcttccacgtggcctccccctgcaccctcaaggaccccacagaccccctaagagaccttctcgaacccgtggttcagggcaccctgaacgtcccaaagcggcggttggcatgcgaagatggtggcgatggcgctgatcatggaggcggcgaggaaggagaagccgaactcagcggagttttggaagaggatcatgacgacgtcgcccttgtggattccgaggttggacaatccagcggcaattttgcgggaaataaggtgcgtctcggcgtagtgaaggttttggcggcgggtccaacgatgaggcatgggcggtcggcgaattcagagacgttctcgaagcagtagacgtggagagggaggtggttggagattggtatatctagtaattttgatttgaagacatggctagtttgggaatcacaaactttgttttgatcagtttttggggtagacacctctttggcatcaagagaaggagctacagttatcatggtgtcatatataattttaatttttttaatatatatcaaataaaattagagtaattattagtttacttattggatcattgatacaataatttattatcttgacctaatcaataatggaactgaatttcataatacttactatacttatcacatgatttttcaagtttgactttagttaatgttatttgaatacatgttatattagtatggtgtattatgagtaatgtaagataatatattagaaccagctcccattttttaattgtgtatttaacatgaaagataggatcaaactaattttacatgggatgattttattcaaataggataaaattatacgtgtgacaaaattctttcttttaaatatataacataacctatcattaattaagttaaaataattatgagttgatccacaattttggtaattacatttgaaggtttaaataaataaacatagcctaccaagaagaagggttgactatttcatcctcagaaatagtaattaatagtatagtttggctttgttgtctttgcctccttaacagatgatgagtcatgagtgacagatacgccgccggactggacttggagttttgttttgattccttctcacatggatggcactcacttgacctgttcagtccaagatttttcgttgaaaggcatgggctaagagctagctcacaaccacgataaatcattaatcatagcccaaaaaattaaacgctttaatttcaataaaagacaatttttcaacagcttaaaaagaagtttgagcgaagttttttaaataatgggtcttgttaataagtatttttaaaatattaattaagatattaaaaaaataaattatttattatataaattataagataacgtaaaaaagattttagatatcataatttttattttttgataaaaatatttttactttaaattttttaatcaatatatttaaaatactgattaacatttttcttaaataatagagatttcagggagctattattttatctcgtccattattattggagttaatcttagtcagctatcatgatgttaaccttctgtccatttatacatagctcattttaaggattctacttttccatctaatattattgtcatcatgtttatgtgcagctggatttattgcttagtttcagatatgtaagttttattctaaacgaattaatggagtcatgcaaattattcaaaattttgaaacgggtgtcttttgtgtcttttattatcatttcactggcagcggtcccttatttgttactacatagctagaaaatcaaaacttttcaaaaaaaacgaaaagatgattgaataagtcagaggaacatatgttattcatctatcaaagaattaattaaaatgaaagctcattatagcaaaatttgtttaccctgcctaatactttcctatccactgaaatggcaaatctaaagagtcgacgcattatatttacaggaataaaaaaaattaaataataagagtatgttttaacctataaaaatattattataataactttcaatttttttatctttttccttcctcacatcacatgtgtcgaaacaatgttgctcatgcatatagcaacaaatggctaatcaattgttgggaaaacaaatctttcggacatgaaacccaagttggtaacgaaaccttttttgtcaagtagttttcacctgtaatttgcccgcggtcaacaagaaacgtaaggaattaagaaaatgatagacatccatccgaatttgcatgtccaaaaaaagagtcaaataattatgtagaaaaggcttctctagagtccaattattttcaaaataatcaaatacgaacattttagtatgaggatccgtgataaatattttttataaattaaattttataataaatacgtccgtactactatatatgtagtatactttaggtttacaatgaataatttaaattctgaatctgatataagaattttttttaattattaatattttttaaaaatttattaaaatgcaattaagacttgaaagagataagcatgaaagattcggccaagaaaagttcacggatcagttgacgacttgacgtacgtacttgatgacaaaggttaaagtttatattattatatgttaagcgagtttcaacaaccaagaaggtgtcgtaggggaaaaaatattacatgattgaaaatagggtgtgaatttggatatgtaaatggagatgttggcggggacggtcatatatgaaatcttgcatatgaaagatttttcccccatggggatggggatcagataaatattctctcgtgactacggtgggggatgggatcacacctccgttttaagaaaattaaataattatttttatattaattattattttatattttaaataataaaatattaaagattgattttatattttacttgtattagaatttaaaattaatgttttaaattgttggtgaaactttttgagtattttttaaatttacttgtattaaaatttaaagttaatattttttaaaagttcagattcttcgaggactgtgaagatctatagagacggagacaggaaaaaaaaatctccaagatggagatcggggatgggatgggagtagggagtattccccgtccctaccctgtttcgttgagatccctaattgaaaactattataatttcaaataatcattacatatagttaaatattattaatttgccaataaaatgagaaacaaattcttttatatctcataatataagacatccttaagttcatatgtattgaaataatttatttagcgagagaatctgtatttaattatgtattttatatgttcataatttgattttcaaaatagtgtaaagtgttttgaatcagattcggacctattcttcatctcatgtgtaaaatttctttggatcatcaagagtcatgcatagcaaataaaattagtttttaacttaataaattaggaaaaatttgtgatacctaacccaagaaaaaatatatatctcttaatgatataaatttgatttcgattacccatatacaaattttgttagtaaaaaatctaaaaaatatttgtataaatattcatttaaccttaagatcgaaccctaataaatctcatataccaactcacctcaacttttaatgataattttaagtgtgtcccagagaaattgattaaaacaacaagcgatgctccgaaagtatctaatgagccacctcgatctcatctgaccaagcttcctggttagtacctttgaattgaataatataaaaaaagaacatgatggatgggggtagagctcagtataacccacctacctccaattgctgacttttcaaagctagactgcccaaacccaaacaattggaattacatgaagaaatgttgcactataaaaaggggtgcccttcagctatgtccatcaacaaatattggaatactactcttgcattgcatactacactatacttgttaaccctttgagagttacaatggctgctgctattgaaatccccacaatagtgtttccaaactcctcttcccaacagagggtgccagtggttggaatgggatctgcccctgacttcacatgcaagaaagacacaaaggaggctatcattgaggccgtgaaacagggttacagacactttgacactgctgctgcttatggctctgaacaggctctcggtgaagctctcaaggaagctatcgatcttggcctcgtctcccgccaagacctctttgtcacttccaagctttgggtcaccgaaaatcatcctcatcttgtcgtcccagctttgcgcaaatcacttaagtgagcattttttcacacaaaaactagttataattcataattaaacttcttttatgagtttgtgcatctttgattttacctttgataattaattctaagtaaaaaattaattttaaatatgattttacatgtttaatattccgttagagaaaagttcaaaattgattatgaattaagcaattttaagtaatatttgcattagatccaaaaatttcgctaaatttaactcctaatttgattttataataaaaatatttgaacataaatcatatcatttcaaaatcaatttcattcaaaattttgtcaacgtttcaaacaagtttattctgacttctataaatgctctcttgtaaaagtttatatacatatataacttaattatatgctataactctgtctgattcattttacttcaaatatgtatatcaatgcttttacttaacatcaatttttgtcgtgcagaactcttcaactagagtacttggacctgtatctcatccactggcccctgagttctcagccagggaagttctcatttccaattgaagtagaagatctcttgccttttgacgtgaagggtgtgtgggaagccatggaagagtgccagaaacttggcctcaccaaagccattggagtcagcaacttctctgtcaagaagcttcagaatcttctctctgttgctaccatccgtcctgtggtcgatcaagtaagtctctctctctctctctctctctctctctctctctctctctgtatgttgtactttgttttgtttatgggaatgattaatgataagattaattaatactgttacaggtagagatgaaccttgcatggcaacagaagaagctaagagagttctgcaaagaaaatgggatagtgataactgcgttctctccactgaggaaaggtgcgagcaggggcccaaatgaagtgatggagaatgatgtgctgaaggagattgcagaggctcatgggaaatccatagcccaggttagtctgagatggttgtacgaacaaggtgtgacatttgtgccaaagagctacgataaggagaggatgaaccagaatctgcagatctttgactgggcattgacagaagaagatcatcagaaaataagtcaaatcagccagagccgtttgatcagcggacccaccaaaccccaactcagtgatctctgggatgatgaaatataaactatttactatgcagctcggagtctatttttataatccatgtttctttctttttaccaacccagctctgtctacttgtttgatttgaggtttaaataattgatgcgatgtcacttcttattttagtatttcgcaccacttcttttccccttttactcaagcccacctgcattgactatttattaatgacccatctttcgtcttcgatttgacgaggttattacttacaccttgaaaagaacactataaatcatcaaatttaatgaagcatatcatgcaaggattgcaatctaaatctagcctaactaacagaatcgtacgtcgcgtgtttgtagctccaataagccaaactgtaccacatacaaggaataaactagggacgtgctgcacatgatatgaataacctatgtttcatttttttcttaatacttctatttatgtgaagaaaagaattttgacaaatattaaattccgttgaaaaataaattaaatatgataaaaatttattttcgtaaaaaatcaaatcaaaatattattcaaacgatttaatttcaatttcaatatattaatcacttatttaacccatttgtaattttatcttaagaaagtttgattacagtgacaaatacttgggaagtcaaatttcttttaaccaattaaaagtaaataattactactagatgatagtgaaacatgattttacactaacattaagttaaatttatattaatctaattatacaatctatacactttcctgcaagtttctgtggtaaaggcccagtcttcaaattttgcgataaggtatgaccaattattaaaaggagtggttgatcagctctactatttctagtgtcgttttatcaataaaaaattcagtcaatcttgtttgttaagaatcggctacaccatttacaccatatatattagtatttgtttttaaaattcaacatattaagctatatgttttcttaaatacattctcttaattggtgaaattaaacagaaaaaactagtaaaagggcgagtgaaagagattgccaacgaaattaatgacaagttataaaaataaaaatcatgtaaattccacatatatgtttttagagttttatactcacgcacgtgccttcgtttccttgtttctttttatctagctaccacaaaaagccatgactactctggatcacctttagatagtctattatggaccacatttaataatcgttagattcatctcaggtttatattgataccatgcattttacacactagatccattctttcctccctctacagtccctctttgtcgtatatgttactggagaaggcgatttccagcgcagcagcgacgattttcttttttatttttaaaatcaacttcttccttttcttcctagattcaccggaatcctcatctctctgcatagttcttgcaaactttcctttctcaagagaggttaatggaaaccattgagtattaacaaacaacttggaatattgcggtcaagagtggctctgatcactgcatacaaacttatagaaacaatttgaggattgaaaacaatttctcacactttcttggccggaatcctcatctccgctgtccacgagattcgcaacatgcggtgcttgtggcggcacaccaaaacctccttccagtggctcctttgcttcttccttgcatctgagaaaaagttccaggcacggggcgtagatttacttccaactctagttccactgcgtgttgcggatctcggtggcagcaaagatgaggaaggtgacgccggcgcacggcggagaaggtctgcagagggatcggaggtgagaacaaatctagtgtgcaacatacatggtatcaatataaatcttagatgacctaacaagaaaacctaacttcaagcattttaagtttgagaactgttctcagcttctaatcgtgacaataataaacaccaactacataatcatagttattaataattgagttataaaattaatatcaatcatttatgaataattatatgattaaaaattatcattttatcatttttatgataataagtaaaaataatttccatttaatatgtccatataatataaacaattagatgattttttttttcattcaacatttaatacataactcaaatctttcagcattcattttctttttgtgacatcttgatcttttttttctccctaaaagaataaacaaaaataacaaaattacaaaaacgaacgaaatgaataaaatagaaatttacaatcagaaatataatataaaaacaaaaataacaatacaaaaaattcaaaaaaacaattaatgttatgtctccctccatccctatttagaaaatcattttaactaatttgcatcccttaaaaaataattaatttaataaatcatattaaatctgtaaattaattatattatcattctaaaattatcttttcttatctctctatttgcttaattatttctcgtttatatttaaagaaaataatcaaataaaaatatgtaaaaaaattaatatatccaaaaattacaaatatatataatcttataaaaaaagataaatgaatttaaaaaagaatattagaaattaaagaccagatataatatatatctccaaatcccattctctccttagagttttctacttgttctccaaatttcacagttttgtaggcaccatatccctgagtcacctaatcattcttaaccttacccctccacgtgacacctattgccttgtccgtggtctctgcgtgagaacaaattggctcagcaccattacaccaccaccgaagccaagggatatattttgaagtaaatggtgtttcaaggagctatcattttaacaacttgtccatttattattggacaatattcagtgagtgagctatatatcatattaaccctctgtagactgacttgagacttccacgaattgattcgcatatgatatgaacttggacagtgttaaagttcagaatgaatacccataacaaataatagaaacgtacaataattaatcattaaaattttaataaggtacaacatattaagagatttaactcaattaattattaatatttatctttaattcttatatattaaaacaataatgttcataatattgcctcaagtctcaactcaattcaatatctcatgttctttttgaagatatacttttttcaacatttatgaattagtgataaaactttacttaataaataatatgatataacattatactatacttatatatatatatatataaataaataaatcataaaatatatttaataagatttaacaatacataacttaattgtatattttatgacttaattatcatcatgttacaaatttttcttttttacaaattttatcattcaagtttttaattttatgtattttagtattcaagtttgtttttcgtatattttaccatttaaattttttatttttatgtattttattattatattaataacaaaacgacattatttttaaaaaaattgatctttttagtgacatcatcatttacaaactatacaaattaaaaaaattcagtgaataaaataataaaaattgaatgataaaatatgcaaataatcccaatgttgcccaatatattatcaagcttcaatcaggtcaaaattatatactacaactaattgatcctcaaattcaaaccgaacaaagacaaagataatcgctgaatataaaaaaaaatgacaagattagccaataccacaaacgcccctaatgtaatgtaatttgtaatgcattatggtataattttataattcaagatagcgaacaatactcgaccatatttgacttgtgtcaagattttcctttaaaagtggcacgcaagttgaaatttagaatatccaattcccaatttattcaatttcaaaactcagttcccttttatcaagtaatgtagaaattcagttaactacaacaacaacaaatccttatcccatacttatcaggcaaaattaatgaatgttttttagcggcatctcatacttttcatacaagaccaagatacaaaaaaaaaaaaaaaaaataacagccacaaatctcacgaatcatatgcagatctaaatcctgccttgcaaacaaatagaagttctattctatttgacttcgtatgacagtaaatggtagattgtggaattacgtagcaatctctgagagatagctggtaaaaagatacactgcatcctgcaagtgaacagagcgttggtcttctggaatgggagcactgaaagaagtgtcaaagcagttaaactgctcatcacgggtagcaccatcacctacacctgatagtagcaaatcacatatctcgcctgccattcttgaatacaccaccctgcaaaatcagtaataaccgtgaatatggcaaatgaaacttctctaaacgggtgacccatcacatagtaaatatggccaactaatgaaataacatgtcaaaaacatacaggtgcttaaattattgggataaagacgtgtggttttgatgtagtaaacaaactgcaaaaccagattcaataacactagcaactaaactaatatattactgtattatcaaattttctttgcctctttataagtccgctgccagataaaaaatggttttggataagtatattagcaggcctataaaatcagaaatcgagctgcacaacctaaaaacaggtcaacaagaagttactgcaaaggacaacacataccttgcatcaacaggtaatctgcaaccccaaacagctagggattcatttagctgactgacaaaatcctgacaagcagcatttttactttcaagagaatcctgaaacaagaaattacatgattttaattgatcaatcaaatggaaaaaggagtattcccttaatctctaacaattgaaatcacaacgaagagtatccactctactgatctagcaaacaaacactgcaactgttacctagcttcataaatcatatttttaagtctattaaaagattatctcatggaaagattgcaccagctagaagcatttcaaataattgggtaacaggcattattgtcttttgcaccactgcatgtgtgtgtggttgtgcccccaaaatatcatcatattttgtgataaatttgtaacatgacaattccatgtttcaagcaggatcaaacttgtttaatatttagttacacttcacaatcatactatgacaggatcaagtaacaaccatttttcacataaatgatgatatgagggatgatcctcttctataaattcacgtaccaattcagtcatagcattggtatcatccggaagtgagtttctcatcaaataaaatgaaatataaatatcagctcccaactcccagttttcaatttcagatttatggtcctccatggaagttgctatcctccatatctcagcgtgttttgctgccaaagatattaaataagttatctatgatgcacttatctggaattaagaagaaaaaatctagtaattttcttctattgaaaagaaataagttgtgataaaatgactttcagcaatttaaagtaatgatgatacaggacaaaatggggtgtgggggggtcaacaatattttattgaattttcatgtagttgttgaagagtttttcttttgtgatttactgggttattttagattatttcatcgtaattatgatgaaattaaggccctgttaggatactatatgaataatgaaggttcttgaagatttttttataaatgtccataaaagagcaagcttgcatgagagacgcaggtattttctggcaaatattattcggtactccaacgttttccttattttttggttttccatagttatgactttggcaaatattattcggtactccaacgttttccttattttttggttttccatagttatgactttggcaaatattattcggtactccaaggtgttttttaccaagcaatatacacacacgacttaccttgcaagaataacctatgagcaactgaagttataaaaatagcatgagctttctgccaatttgcacactgaagaaattgctcaagggcttttgagtgatccccattataattataataaattgcctgcaccgccacaacaaaatcattcaaacaacaataagagtcatttaaagaaaaatacaaaactttgcaacatttcaagcattaatatagcccattaatcagtaaagaacaccaggacaacaatttaattcagttttagacataaattgatcataatgtgtgcccatatgaatctaataagcggtttttgtccttaaaaaaaaacaaatctcataggttttataactcaagcaaattgaaaaaaaatcatttatataaactgaattaatagtataatcagaatatacagtgtgcttgtatttttttttcttttttcattaatggaacaagagggatgtactagaaagtaaagggaagggaatggaacaaagctatcattatgcttatttggaagattaatataggaacagatagaactccgataccctttgagttccccccactccaccctaattttaggggacaaaatttgtgatatggaggggaaatgatggggaatggtcccctgatgttctgttccactccaatctgtttttaaactcccacaaacaagggaacttattgtccttcccctgattccctctccattcctctcattatctatcatccaaacatagtatgagagaaagatgaagttaaaagggtactgcaacaaattatgaatgccattgatatttttctttttacaaaaaaatgaataaaaaattaaaaaatatgatgcataccaaagcctcatgcatccaatctgtgggaatgcctaaatcctcaatgaactgttgctgagattcatctgaactccaagtttcacagtattggaacaatatttcccgaatcagatttacatgaagatatggataatcttcacgaaggggcaagtgaaggaccacatatagggcccaatgacatttccctacacacaaaagctgagacacaaatgacatatctagaatatgaagatcattagaattgataacacccacagcttccaagactgctcgttgatgccaaatcatatgataatcaagtggatcaggggtagaagagaatgcactaaacatagccttcagaaagctgaattttgtctctttgctggcatgaagaagcattaaataaaatgaaatgtcaaagtggttatccgtgttccaactgataacctcctctgatgttccttcatcaataaaaaggggaataggatatggagctgttccctcatcaacaaaatgtttataagtctgaaaagcaatggctaatgaagtgtttggtggtaatttgtaccacattaataaacctaagaacctcctccagtcaattttgatgtcatgcaatgcatcatgaatatttcctgcaagcaattcatagagtctcaatctgtccttttcaatgaaactaaaatccagccctttatttctccaaatatcaagttgccttgcaatatcagagcgattcacagtagaaccaccagcctgacttaacaaactagccaacctcacatctcctttggacaaagccagctgcactgcttcatctagttgccgcccagtcaggagtacaaatatatgctgcagataatcagaatcatttagagagcttatttgattttgaacatgataggaaacactctctcgcaaccaataactaaactctgccctcctcattagagggagtgcttctcggtcaacatcttgataaatttcctttaaatcctgcatcatatcttcctcattgtcagcacccaaagattctacttgacctttttgttctctgtcagaaaaaagaactctaattaactcccaggtcattacttggtgtgtcaaacccaaacgagtagtggaagataacccaggaacactcaattgccgctcaataagatcacaatagtgatgagaaatctcagatagagtcgaacgattagcttcaagcttttgaagtgtcaacttgcagggaccaatttcaacttctttcatcacatggtttattcctttgtgaaaatttaatggagataccaaagcatgatcaacaagttcctcggtcacttttttattttcatccctaaccacattgtcgaaagaaactttctccaaattgacaacagatgataacagtttgtgattaccactgcttcctacgggtgcaccggagtgtacaagaatgccatttggtccccacccaactcgaaatgacttacccataaacagaccagcatcaactatattgtgggcatagtttccagatactggagtttcatgtttgagatctagcttaaaaccttgtgattttatcgtcctaagaggcatgcccttatgctgctgaaccatcaaaatgcctccaggagaatttgaatcaaaattcccatgtttatactcaagtaatggaaatggagtttttctagcaactggtggggtggatcgatggttgattgcctgagttgaactttgtaaaggccgcacatactgcttaccagaagatgatttgcagcttaagtcctctatctcttcttcatcaggaaacatcaataatctcatttctctcattttaacaggatcaagcctaagatgagaaggaagagaatgagaaagttcaagttcattggtatttgatggtgattctttctcaacatcatatacctcagcatcatccataacaaagtcttcctcatcatcatcaccaaacccaaacctgctgaagtgtccaactaagaatttccactcaccagtcactagatcaaaggaaataaatcgtgcttcctgcctctttgtaatttgttttaatttgctaactataacatcttccttcccctccttagacttcaatatttcactgtctaataccaaaactacttcagctgccttgttaaggccctggccaacagcaggcttatcattttcatcactgtatacaactatctcatgcctatgaaacttcacaatttcatctatacgtaaccccctgacatcagtttcattgagatacctgacatatccataaccaaatcttccaacagtgaaatcaggaacacggctgcaataaccaggttcaacaagctccctggccactaattccttcaaagatggtttggtgtaataaccggacgagttcaagataggtagggaagcttcagtttctgtcatgatatcaatggatggatgaaaacagcctttataaacccttcttctcttgcaagtgtgcaaaatgcatgaatcagagacacctccaacgtcacattccatcacaaagctaggtcaaagtgaagcgttgcgttctgcacattgaaatttgaccgcaattccttgatgtagtctctaaaacagaaaaataaaaataaaaaataagcgcatatgccagcaaggggaactggatgttgcatcttatcgcatggaaacaccacgaaacaagcaaatgataggaatatacaggtttcaatttacctcttaggttaacttaaaataaaacgatagaagataaaagaaaagaaaatatgcaatatagctagactacacaacagaggtatttatttataatgaataaatatgagtttgagaatatgaaaactaaagatgatttgattaagcagttatacagatcaagcttactgaaagtgcggcatagcatgtagaagcgtagaaataaaacgaaaagaaaaaccaaatacatagagttaagtagcgtcttagtgcgtaaaaaagaagaacaaaagaaatgaagtaggctgaagttggaatacttaagatgaactcacatcaaaggtggagcagcaagcaacgacgctggagcgagcgaggacggtgagagtgagactgtgagagacggagtggtttagcgggatttgggaaggacaactgaagttgggccgagttttaatactacaacaaagacgggcaaatctacaatgggtatttagtatttacactttccatattgttatttctactccccattggcttctttttttttcttaaaatatatattactaagaagtaagaatatatcttttttatttatttataaaaggtataaactctatttttgaaatatttctgaaagttaatggttaagaatagatataatcaataatatatcatcccaaaacaaatgaattcttcaataatcttgggcctgtcttaaatgatagggattgcttctatgttcactgtcccgaaaagtagaggtatctgtttgaggttcttcaaacgacaatccaaacacacgattaatctcttcgtcaaacacatctttacaacatgtagatatttcaaaacaagctctgaatatttaaatagtacatactaagtactacatttgatctttagatataattgttcatgtgtccttacaaatagaattaccccggacataaagacatgttgggctgtattgggccaaggcccatgaattcccccgctaaagggagggttcttcttcttcttcatatttttcttttttccttaaaaccctcttctctgcttgctgcttgctgctgctgcctcttttggttgagttgcgtcgtctctctaacaaaacaaacaaaataaaaatgatttctgcgatttcgtgggtgcccaaaggggtttcgaagtcggaacttgtcgtggctgaacctcctcccgaagaagaaattcaagggataatcgccaaccacgcaaccaaaaggtggtccttttgtttggttccaacaaaaattatcattcaccagtaaaaccctaacatccaatttttttttatgtgcagtggagacagtgacaatgaagacgctaacaacgatgaagttgtggcacaagcattaaccgtagcagatgcagtcggcaaggccacctctggaacctgtgacgaaataacccttgcgttgaaggaccttgatatggaccgttatgatgacgaagatgaaggtacgtaattctgcattctatatgatcattcattgcttgtacttatatgtatgcaatgcagcagctgcttaaacttacgtttgtcatttgtttaggaattgaggtgttcagttctggaattggtgatctttattatcccagtaacgacatggatccctatctcaaagataaaagcgtaagttccagctcttgttgtcattttattagcgttgcggttgcggcgcgtgtcttcttattatcttacgttgtttatgatgcttcaggatgatgattctgaagaactcgaagacatgatcattaacccaactgattctgtcgttgtttatgcatgtaccgaggatgaagtcagttatcttgaggttagtgagttagttgttttgtgacttgtcaagtcctcgtatattatacagatatatacttatcactcctttctttctgcaatgccaggtttgggttatcgaggatgccgattctagtgaaatgaacgtgtatcctcaccataatatcattattccagcatttccactctgcacagcttggctcgattgcccccttaaaggaggagaaagaggttctttgcacgatacctcttgcgtgtgtatttgtgttgatcgagttgcttgattgtttgttttgtgcaattcgacttttctccctccccagcactcaccatttaattgaattgaagggcgctcctagaaaagtgaaaaataacaagtctgaaggaaaacttgtaaactgtctttaattatatcctctgattatttctgccttcattttagtatgccaaaaatgaaaaatatgaacaattcatatatcatccaaaggtgaagtggaaaaattgtaatggaaagttgcatttcattagaaaataaagtgagattagtatatgctgttcacttctgttgtgtagaccattaaaaaaattcttcaaagtttgagtaactgtctaggtttggactacctgaaatcaccaccattgcaatttgtgtttaaaattttacttgatacctacttgatatatctttgctttatcttattagcttaaaataattttattatgatcacagggaacttcatagctgttggttcaatggaaccttccatagaaatttgggaccttgatgttgtaagtggtttgagtatataaattttaactgtgttgtctgaaatttcatatacaaaaagagagatctttttttctgaataccttgtaattttcctttgctctcagattgatgaggtgcagccatgtgtggttttgggtggatttgaagagaaaaagaaaaaggggaaaaaggtttgttctacatttttgttaatttcaatccccttagaatcatgtgattacctcaaaatggcagcatacttaattatgatttatttgtggaaattgcatatgttgtgctgtttgtaaggtttgtttgtgctctttgaaaatttaaatgcagttaagttgcaaattattgttgataattcaagtattattgtacatgtgcaggtatatatatgcatgtgcacttaaattgatacccttagcttagctttttacttatgaaacttaatcattcatgtatatccatgtacatttttgtccattgttagcattctgactcaataaaatgatagaaacctagtatatcttgttagaaaaaaaatagggaaaatctcccctggttacagcactgcagaactttgatggtgtgcacctcccaatgccaaaaggccctaatttcctctcacaatggcaggatgccttcctttgctctcttcagttgtacatgtgaattcacttcaatgatcgtagctaactaactactaatatatgggttagttgatctcttactacaaaagatagtgaaaatctcccctggttagttactgcattgcagaacttcgagggtccgtgataagcgtaagccacccatcactagggtgtatacttgcaagcagcgagtaatagaagcaacagttctggaccacccaagcagtgctgaccacccaacagacacgatccatccaaggggcgcaaggtcaagcgatgcgaatcaaggggacatgacctttggtgatcacccaacagacacgatccacccaagggacgcaaggtcaagagatgtgaatcaaggggacatgaccattggtgaagagacacaccctttgggaccaggaagtgtgactcagaagggtgcaaccggtggagaaagagtgcaacccttggagccaaaacaacatcagatctggagcagttacaaatgagaacagtcacaaccatttctgaacaattgtgtctattaggaatagatgttagatgcagtataaatagaagtaaaccagattaggaaggggaggaaaaaacaaagaaggatcagtctgaattgtggagaagcaggctctcgaaaacctgtgttattagaaaatatctcaatttacttatataaaatttctattttatcttttctattctacaccatcttctctgttcttatcagtccgcaccacccaatgccaaaaggccctagtttcctctcacaaatggcaccctttcctctcatctgttctaagtgatacccttcactgattgcaactaactaataaataactactaaccaactaattaaactaactgatggcttagctaacaaaactcaactaactaatggtttatctaacataattgagtatatcttttggtcttttctgaattttgtaacttttttatttgggattgtgaatagctttagatgaaaccgaaattgcagatgtcttatgcatatgagcattgaagctactagtgtgaaaatccatatttttgcttgtactattttattagactttcatctttatttttttttaatacttatagatttttgaagtaaatatgtttggccatttcttattaaaattattttcttgcagaaatcaatcaaatacaaagatgacagtcacactgactcagtcctgggtcttgcttggaacaaggagtacaggtttgttgaattaaaactggattctgcttttattttctctgttggatgtgctttctggaacctaaaagtttatcttgacttttattttcttaaaaaaaggaacatactagcaagtgctagtgctgataagcaagtgaagatttgggatgtagttgctgggaagtgtgatattacaatggagcatcactcggacaaggcaagaaattagctagagcataatttattttttatcatgaggtcaattcattttattgatgaaaccaacttttttctcttcatgttgacacacttccttagaattattatataatttagaactttggagatatgatttaaaacatcaaatagattgaggtgatttttgctgcactattatgaaccaagatggaacagttatgtaattaatcatttaatcttcagctttgaattaaatgctttattcaatctatatgtatgtgagaaacgaatttacaagtctttcttgggtctttgttgagcaatgctccacatttttttataatggaaaaagtttctccttctttggttgaatgatttgacgcaatgtttttttttttttttttttttttttttaattttctgtttctactttaaaatatttgagtcaatacatttcctgatgtctttcagatttatctcttgtccatctattctcacaggttcaagcagttgcttggaatcttcatgcaccacaggttcttcttagtggttcatttgatcatactgtcgtcttggtaatgatctgatccaatattcctttgttactcggcttttctgtattttgctgtcattgattacttattatgccgtacactttggttgtatattgatgtgctaaaagaggcattcaaattaaaaaaattgtttattttttgtttaaaaattcatatagttatctaatatttatagcttttacactttgcagaaggatggaaggatgccatcacattctggctacaagtggtcagtcacagctgatgtagagagcttggcatgggatccgcacactgagcactcttttgtggtgtgttatagttatttctaggacctgagtactaacatttcttttcttttctttacatttttttgataaaacatactagcacttttttatgataaaataataaccaacattccttcagctactaacttttttatgacaaaataataaccaattcttattctgtaagatcaaatttcaattttgatttcgtggatgcacaggtattggttcactaatagtgatttaattgttctgttaggtgagtcttgaagatggtattgtcaagggttttgatatacggactgccaagtgtgattcctcatcagatccgagttctacatttacacttcatgcacatgacaaagctgttacctcagtatcctataatccatcggcacccaatgtatgtatcttcaacagtttggttagaatatcaactgattatatattttagtttaacctgtgccctgttgacatgacttcatgcagcttcttgccactggatccatggacaaaacggtaatagtgaagtcaattttgttatttttcggtatactgtactttgcagattggaattcatctcatttggctgctattatttctcacaggtaaaactttgggatttgttgaacaacagaccctcttgtgtagcatctaaatctccgagagcagtacgtttccttctttttttattttttaaatgggaaagcttcaacgaatcataatatatttgttaaattggcactgatgactggtatcttttttatggtgtttgtttgttagggggctatctttaaaatttctttctctgaggacaaccccttcttgttggctataggaggctcaaagggtaaattgcaagtaagtgaaaagtgcagatgaacaatactttcgttttcttgatcgttctctgattcttggtgtgaaattgacttgactgttgtaacttgttataatttgtaggtatgggacaccttatctgattctggcatctctagaagatacgggaactacaagaatagatcgcaatctgggtcttgatataattgagttgtgctgctgaagttgtgttgcataaatcaaaattttgggattcactgcaaaaatgcttttttttttttttttgcatcctaataaccttatttgaaataacagatttgaatgggttgaacataaattgttttatgtgattcaaacactatatagttttttactttttagtttggacatctttttggggacaaaacccaaaccactaattaagaaataaatggttgagatgataacgaaaattacgaatactaacatctaacattttttgataaaaaaaactgtaaactttattgtatatttatttaattttatcagttttaaatcaatggttttctaataaaaaattgagtgtatttatgttctatatctccattattttagaagcacaaaatccttaatacatatatacgaaaatatactcttgaatatttcacataactataaatatccgaacctttcgaaataactatgaacctaataatactatagacaagagactagaagcaagtaggaacgaaaatagactaggtcaagttacgctttgttagatctaagctttagcatgtttacgtctcaaatgactttttaaaaggcatgtcttaacatacataaaagtttgacatgatttataagcgtggttgatcaaacaatgaatgaagcctaaagaaagagttttagttattttatttttgggtcgctctttctttcttataagtatgtttaaaagtttattttataataatttaaccttgtgatagaggtgaaaataggaacttgagactttgtaagaatgaagttttacttgtttatatgatatgaacatatttttaaagtctaatataacattcatatgataactcatttaaaaatatattttacagtaaaacccctaaaaatgactaaacttatctttcaataaatcttaaattattcattttttaataaaccaaaaataaagtttatctttcatgatgcttaaaacgggaataagattgatactgtattaatgataatgatttatattttttatttatggtaatttttagaaagtatacttttaatttggatttgttgtaattatatatttattatgattaatgaatttctgcacatatttacgcataacgtattttatatattttgagaatagtcaatttgctttatcaaaaatatactatatctatgtcctttttttttttttggtagtgaatatatactatatctgatatgtgtatgatatttgtgtatcatctctaattaatatgtattgcagtataaaaataataattaatatgtattgtatttgatatgcgtttcatatctgcatatcatatcgatatgtcaaatatgtatcatatagtgccttccataaaaaaaataaaaaatatgtatcatatagcgggtatatttgcaaattatctttactattctactattcttaattatcacttgagcaagtgggaggaaccattttgccataaaccgtgggattaatacaggctgaaatttattagaagttgcataatagggtctctcatctcttgtttaatactaagctattaagtttactcatgattttgtgtatttacaaataaatttaactccaatattttgtaattttcattttattttcggatgaatgaatttgaattattttaaaaaataaatcaaagtagcaattaatttcctaataaaatcttattaacttaaaatttcatgatgcagtttgtaactttatcaaataatacaataatcaacccgtgcacttgatattatataattataaaattattagattatttaattatattatataaggaattataccctacgtgtgcttacgatcttcgacgaagattaatcattattttcgatcgagttacttcatatgagtatcatggtataacaaaattatataaggtatttcaaattgaatttatctgatggtaatttattcttttaacagaaaattaatttcagttgctacaacaatttgccgctgcattaaaatgtttttacagataaattgttattaatttactgttttgaataaaagggtagtcttgaatatagggggaaggggtggttggctatgaaatatgatatcgattcctctgaacaacatggtaactttgagtgtaagaaatactttggatgtcatcttacttctgctgtatgattggacatttttctatagcttcttcattcttcttgttcatctttgactgaggttctacagtggctttaccaaagcatgtatacagtcattttaattagttggtcccgatcatgctgcaaggaaaactttctagagcagtcatgtattactattttactccttagtgtggaaattggaaaatactccggacatggcattaaatattctattgtgctaaatctaaacataaagcaaatgtaatgtatatgggctcatttaataagcagttgaaaaggagccatgtctatactaacgttagcagttaaggttcaggcattcagcagttatcatgtctcaaatcttaaatacagccaaaatagcttattattagttcattactacgaggatcgggatttatccaatccatttctatgattagcattatgattcctatactgataatcaaacacattttttacaagattcaattcacaatggatttgtagaaagtggcagaattgatcaaaggaagggtccttgcgtggttattccctttctttttctcgctttgtgagtatatttttcttatcggcctctggtgtttaaaactaagaattagactgcacttgtgcaagcattattgttaagtcatcccgaaaagaataatacgggacgcttccaagtaccaaccaattccaaagtgctgtcaccttgctgtttcatgtagctatctgttttgttttgtttttcttttcattttacattccaaatgtccctgtattgtgttctaataaactttcctttgcgtttgagtagatcaagtagcagaagagcactgcatcatctttctacatcatctttcagcagaacatctcggtgttaagatccaagcaagagagcactgtcctgttagtctatctaccattttggtgagctgatcacagttgatatcttatgtaaactattccttcaagcaattttacggtcttagacaaaatatattaagggggtgcttgaaaacccttagtttagttgaacacaaacatcatgcaaacagtagattcacactttccaatgcacaaaaataggaagcaaccatatctacgttgaacatgggtttgcaagttttcaactgcaaactgttggaagtgcattggaaaatgggaaatgagtaaaacaaacacactccactccacactctaagcaaccatcaacactcaacttatttctagtaacgtaattaactaaggtctttgagaaatatgttcaatgagtgacttgctgtaatgacgaaaactcaaaactaaatttagacaagatccaacaaggatgttctctctaaggtacaattaaacaatcataatcaaagcagcttaacaccagcttccctgagagaatcaacaaccgctttaaccttaccatgatacttctgctctctcttcaagtgaacagaaacagcgggaatgttcttaagcaaaaggcgttctgctagtatcttcccaatctttgcagctgcagccacatcgcgactagtttccaagcttgatctcaacgctttctcctgcgagcttgcagaagaggctacagtagcagttgggctgtgaatcacctgggcactcacatacttattggtaaaatgcatcttcagaacataaggtttgagaaattgggtaatcctgggaggcctcactgggggtgggataaccatatctgttttacaatataattataaaaaaaaaaaaaaaaaactttttgtgtgtgtcatttttggcatacacataaaactcaagaaatgaacgactatcttcaagaaattatcaactctcagccaagcatttcaatgtatctacaaaatgtaagttcatttcatgtttagtaaatgcaaatttcaaaacatcaactaaatataaatttcaacattcaacatcatgtaaaaatacaaaatgaccgagtatgtaattgtatattaaaaaacccaaaaagcgaaagatgagttaagttagaattattgggcaaatatgaaaaaaaaaaaaaaaacgatttgtttcattggcaactttgatcaaacagttgaaaggcaaattgcttgacttaacgggttaaggaaagaagaatgacgaatataagaaatggaaggaggcagagagagaaggtgaaagggggaaacatagatacctgaattgagctgaataagatccaaggctctctccctctcgctctcgctctgccctcacaagtcacaacccactttctcaaataaatgtttacgacgctgtccttctaatatcttctttctttttccctgtcctttttaatttttttcttttaattcttaaacaaatattttacgtaacttttttgtccctatatttctcaataattaattaaataatatattgataaggttaattaaaatttatccaataattcgcacctattagcttttttttttactttaaataatgtataataatgtattaattaatatattaataaaattaattaaatactagtaacttattacttgtactatcacgatatcgccactgaaattcaacttagtgaaataaaaatcatgaaattttattattattattattgttattaacacacatttgaatttttcaattttaaaagaataatttctaagaaatagtaagaaaataattagagagttttttaggttaaataatagtagagaattagatgtaattttttttaaaattttttatgtatatcaattgacatgtaattgttcgtgaattcgatttttaaatatttaaaagaagaatatagtctcaaataatagtactaccatgcttataacatataaaaaaataattatttgttcgaaataacttcaaccaaacacataaaaaaggattattaggtaaatttaatgatttattcaaaatatatgaatcccttaattacataatatattcttgctgctttttagaaaaatggaaactgatttcgtactaatcacacgaatagttgtttccagttaaaacaaacaactttatctttttttttttttagtttttaatttataattatttaaaaagatctaacaacttatatctgatgattcgtatgttttgtgcatctgttttctcgtacttaatagcaataatcttaaaaaaaatattgttcgagctattttagaaattaaatttgaacaattgtttcaactaaaatatagttaatttatttttttaaaattgataattaaacataatttcataattagcattttatttggtccttaaattagaggaaaattggcttacacacaatgttaaaggcataatttaatttttcacttttttttggagaagtaattatatttttcactaagaccaagtatccttatttgaattaagataaaatgtttcaaaggtatctcaccaaagaatcaaagtgataagggataatgctttgaatgaatttgtataaacttaaaagaaataatttttactattagaaaatatatttttaatgtagtcattttaatattaattttattaaaattaatgttaaaaaagtgtgataatatatttgtaaataaattaaatttattaacatcatttttttttaaaattgatgtgaatatcagttattataaaatttaatgttgtttgatgcttattttcattgatttttatagaaagtggcattgtatttttttccaaattaaaaaattcaaaatctgtttcactctcttattttcgcgctcactctcaccactctcagtccacttccaaaatcccaaaacaacgcttcccaaacccttgacactcacttgcgacactgctcgccgttccctcatctctgaagtccgctgcgatggcgtctacatcgtttcgacgctgctgctgcgatggcatctacgtctacggcgtgaactctctttgttgtctttacccttcgtcagccatcaatcgccatcgtcgtaattctctaaggaagaatccgtgattgtattattcttactccttctttccttcgtttcttgtgtttttatattcaattattgaatagtactcgttgaggcttcatggaaatatatatttagcggtgatagagtggaagccatcggagctaaagctcaagggttcgctgtctggcgttaaggtcgtgactggtttggtagtggtctttgatgatgaagatatcccttaatatatatatatatatatatatatatatatatatatttacttacttttggtatttctttaatatactaatgtgaggattaaaatctataagactatataattgtaacagttttgtgacttctatccctttctatttatgttttgtatggtagtgatacactagggtgaattgttcaatgtggttgttttaatcatctattattttttaattgggagacaagttgtttgattctattcgcatttgcttcaattctggtttgccttctttccttcaagaaggaaaaaggttagttgatgaagaaatttgttggtggctggtgcggttttagatgctttaactttttaaatatgagagtggacccatgtctgaggggctttgtctgatttcttggaacaaaattcgttgatagtgatagtgatgtcccaattggacaattgaagctactttgctgagactgtaaaaatgatttgcttttaaacaatcacctaatttaatcatgttttacctgattctgataagtcattcggttttgacattgttgttgaagaggcacaacgagctcatgtggaagcagaaagcactaagaatggtatcggtattgtcaagttaatgggtctttacagtggtcagtatcatttatgttatggtagtttacaagtttagtttgttggtatagagttgaagaatactcaagaattgacgcaacttagtggttagtggttagtggttgttgtatgtgtgtgttttatttcattgtttgcttctctttatttttgttgaattctccatgaagtttttgctagtaagttggatcatgaattgagaatatttgttgcttgagatcctaatgtctttttgaaggtatcttaacacattttgcttgtgtttgctagtggtgagaatttgggtagtttgcatcagggaataggttcagacttcattggcactgatgcttaaaaaatgattttagtcaacactctgtattcttcttctgctgatactgatatactgaaactgaaatagctaacaaagtgtatccaagagatcttgcaccctctcttgctctttactggtttcttgcctttttcgttcggcatccctctcctcttaattatctatacagttaaactattccacctaattatgtatacaaattagttttagcattttctcacgaatctaagatgaaatcaattatctatatccagaataatttctcagatgaggaagacagaataatttgcagcctttatgttaatattggaagcaggtataatagttaccaacatttaatgcaaaaacactatcagtataggccagacaatttttttttagccttttctcaccaatcaaagctgaaatcaattatctatatccaaaataatttctcaaatgaaaaaagacagaacaatttgcagcctttatgttaattttggaagcaggtataatagttactaacatttaatgcaaaaacactatcggaatactgctgaccaaattattttttgctttttctcaccaatctaagctgaaatcaatcatctatctaattaagttctcatgcatgccaagttgatccaagtgcaacaccagcatccgctatgtctaattaagatattgagtaaataattttttgttcatagatttgcttcctctttctcatcacaaaaaaaaaccttcatttccatcacctacccttcaactaaagtcaccgtttttacgattactttactttttgagttccaacaaaattttgattcttgcaatagttttaattctgttgtcaggcttgagtttattagtcacatggtcaaacatactctttccaggttgtagaaatccttaaataccggcctttgtggtttcacgactgtcaagctgttgatgttttcaatgtgctacccacaacaaatggtggaaccattgagctgctttataaggcattttcaactcatctattttatgtaatgccaggggtttcaactttcaacgaggcactcaatgggtttactgatgagggatgaaggtcaagttatattgcccctagcacacataattgagcatgaagaggtaataaattgtcactaattatgcaatagaactaatagttttgcaattcgaaatttactcatttctatcttcttcgtgctagtttttggaagtcattaaattagaaggaattgctcattctcctaaagacataataacaccaagagaaaaaaacatggggtgcaacttgaaaagaaacacaagggatgtgagtgtaatttactcttaaaaaatgtacttaatttcaacatcggttgtggttgcaacttatgtaaaaagtgttttacaacatcgattgtgaacaaccgatgtaaaaaagtgttgtcaacatttgtatttgaatcgttgtcgaaagttgttcactttcaatgacggtcgattcaacatcgttgttaaaagtcttccaaaaccaatgttgaaggctttttttgtagtagtgtttacaacatgtgtgttttttttaaatgcttttttaagaagataagatttgattcctaaacaaaataaaaaaaattattttaagtaaaaacaatttagataaacatgagagaaaaataaaaaaaatacttattttattaaaaaatatttttaaaataaatttaaacaaactcgcttttaacattgatgaaaaagaatttttaagtattgaaattttacaattagaagtttatcggttataagttagtgttaactaatgaattaccattaattaatagtaacaagctcaaaccaaacaattgctcggacaaatttacattgatatacaactttattaatcattagttagtgttaactaatgaattatcattaattaatagtaacaagctcaaaccagacaactgcacggacataattaattacatcgatatagaactttattaatgatatgttagtgtaagctaatgaattgccataaatagtaacaagctcaaaccagacaactgtacggacataattaattacattgatatagaactttattaatgatatgttagtgttagctaatgaattgccataaatagtaacaagctcaaaccagacaactgcacggacataattaattacattgatatagtaattatatgttagtgttagctaatgaatttccattaatagtaactaactcaaaccagacaattgcacggacataattaattactttgatatagtacaagtctgttcacattgttaatggttttgaagcttccagactcaagtataaatagagttccatcatattttgaaaacaacattcatcgctaaagagtacaagaaaataaagtttatcaataacaacatggatatgaagttgaatatttcagccatcaatgttttattcttattgctagctatttctagtacaactcaatcggttgacattaatataaaaaaatttggcggaggtgcagatataacacaggtaaaaagcagttgaattccctaaaaaaatgattgaatattccactaattattattattggtattgtgtttgatttgtaatttatatatatgttgtcctcaaggctttgacaaaagcttggaaagaggcatgtgcagcaacaagtgcaagcaagattgtgattccaggtgggtcatacaagatggaagcagttgaattaaaaggtccttgcatggctcccattgaaattcaaattgatggcacacttcaagcaccggctgacccgaatgcactacaaggggctgatgaatggctcaaagtacaatatgttaacttttttaccttatcaggtaaaggtgtttttgatggtcaaggtgcaactgcttggaaacaaaatgattgtggaactaacaagaattgcaagacacgttccaaggtaataaataaactatataactatatagccatttcaattaatctcaaattgctagcacagtcacttctaccaaaacattctaatgagctaaatttcttgtaaacagaattttggtttcaatttcctgaataattctatggttcgggacataacttctaaggatagcaaaaacttccatgtcaacgttttagggtgcaataacttcacattcgatggcttccacgtcagtgctccaagtaccagtatcaacactgacgggattcacattggaagatcaactgatgtgaaaattcttaacaccaacattgccaccggagatgactgtgtctcattgggagatggcagcagaaaagtaactgtccagaatgtgaattgtggacctggtcatggcattagtgttggaagtcttggcaagtacccaaaagaagagccggtagaacaacttctagtcaagaattgcactttgacaaaaacagacaatggtgtgaggatcaagacttggcctagttctccaggagcttctcctattactgatatgcattttgaagatattaccatggttgatgtcatgaacccagtgatcatagaccaagagtattgtccttggaatcagtgctcaaaacaggtacttatatgtttaatcagacacgattcttaaatttaaatgtctttatttgtgaccctttttataatcatactggagttgttattatttaaatcactagtattttagtcttgattgaatatgcactaccgtgaggtttcttataccttgtttttgtctattttgtgcatgcttgcaatggcttagactccatcaaaaataaagataagcaaggttaccttcaagaatattaagggcacttcaaaaaccaaggaaggagtgactcttatatgtagcaaaggtgtaccatgtgagggtgtggaactaaataatgttgctcttacattcaatggagctccagtagttgctaaatgtgctaatgtcaagcccaaagttactggaaaagctcctgcttgcacagcttaagagacttgggttgacacattctccttgatcagatttttcttttgtagattcataagcatcgtcgtaaggtgacgatgaggactatttgaagtctatagtgaataagcatttgtatatacttatgttgtcaatgtctaagggtattcattcaatacgaaatccttgtgcaagagcatatatatatataagactgactttctatttactaaagaaaagttctcatgccggtcacaattgctagctagaagctacgaggctttcctgtcttcgcatatagtgtattctatatatcactattatttatattagaataagagtatatatttatgtacaaaaaaaaagagaatatttataaatatgcttgaaagtgtataatatatttcaaaacaaattgttcaggtcaaattatatttgagatatgtatgccaacttcaaaatgaggttactttattatcgaatgataatgaaacttgttgaagatgaagaagaattatcaacaatcaatcacttatccttatctattaaggtttaaatgaaatcatgtttgtgcaggggtgatatactgtgaacaataaatatgtatatttctgtaaataaaaattatacatgtatgtttatgtatatattaaatttttgttatatgtttgtgtgaaaaatcctaaagtagaccttagccatcaaacacccactgaaaaaaaaatatagtctcgtatttctaaaagaattaatctatatttaatttttttgatattttttatcgggtgcattgttttattagtgatgcttacaaagttctacaaatctatgttaaacgatttggttgtgttaagaatggcaatggggtaaacaagtgtaataaaatactagatagttcacaaaatttgtaaaaatactcaaatggggaaaaataaatccatttatcacatatagttttgaatttgtagcataaaatattcccctttagaaaaagaatcaaaacatatggtaacttattcacgggaccctagatgggtaaccctttaatgtttcacactagtaacaaacaatgcaaaaacctcatatacaatatgctaaaagcaaaccaaaatgacggatgaagaaacaaacaattattgagaagaacccaaaactttgcaagacataaaaggcaaaaaatctaccggaaaagaaaaaggaaaaaagaaatgttgtttgtccatcttttttatattgctgcctcacaagtgatgcatgatacacttccgctatatcccgcaatcagattttacatctcactcaaatcccataacctaaacagcaactcaaaaactcaagccttaacattcccttgtaacctatctctatatctgaaccctcaaaacaggtactccagttagctctagaaaatcaaacatcttgcgtcttaaatcgaaattcggtaacaacagtggtgtgcaaaattcacaattcacctgcttcactggattatcttcacctacaagttcgtgtcatcaaaacgatcttcctatgtagcgattcctgaagtaaatatacaagtttatcagtgttggcatacaagacaactgaaaatgaaaaactaaaaggacacttcacaagtataaagcatcaatatttatttccatccaatttatatgttgatgtgaaaaaattgagcactacaaaggaacatacaacagaaagagtataagtgaattgtagtcaagttttgctaaaagaaaaaagatcaaagataaattcacatcataaagaacttccataacttaccaagactaaagaaattgagattcattgttagaaaaaaaatgaacatagtattacatatcataaagaagaaaatgatgtagaacatattttactcttttacaaagaactcggcgttatatcagccctcttgactaactattaaacatcaagagggtaaaacttcttacattgccctctaagtgggaggggtagagcaccagaggaataacagacaaaaaaaaaacattcaactcttgaatgcatatagcttgctagtttacttcattattaataataataataataataataataataataataataataataaatgttttatcatgtttttcttcttcattaattcgtatttgtgatatgagtgtgaaatcactcgcaatattgttatcaagatatgctacaaatgtttattgttgataaataaaatagcatataatgatattaacattgaagaataaataataataaaagtttgattgtatttttttttctttacattatatttatgatatgagtgagaaattatataaatataaaatcacttaaaatattattaggattatatgctacaaaattagacttatatgtttaatgattatattcaaattaaacatgtcttatattgagtttcatcttgaatttccttaaaaaaaagtttgataaccttgaccaattataaaaatgatgaaaaaggatttttaagtattggaattttacagttagaagtttatcagttataagttagtgttaactaatgaattaccattaattaatagtaacaagctcaaaccagacaactgcacggacataattaattacattgatatagaactttattaatgatatgttagtgttagctaatgaattgccataaatagtaacaagctcaaaccagacaactgcacggacataattaattacattgatatagtaattatatgttagtgttagctaatgaatttccattaatagtaactaactcaaaccagacaattgcacggacataattaattactttgatatagtacaagtctgttcacattgttaatggttttgaagcttccagactcaagtataaatagagttccatcatattttgaaaacaacattcatcgctaaagagtacaagaaaataaagtttatcaataacaacatggatatgaagttgaatattccagctatcagtgttttattcttattgctagctatttctagtacaactcaatcggttgacattaatataaaaaaatttggcggaggtgcagatataacacaggtaaaaagcagttgagttccctaaaaaaaggattgaatattccactgattattattattgctattgtgtttgatttgtaatttatatatatgttgtcctcaaggctttgacaaaagcttggaaagaggcatgtgcagcaacaagtgcaagcaaaattgtgattccaggtgggtcatacaagatggaagcagttgaattaaaaggtccttgcatggctcccattgaaattcaaattgatggcacacttcaagcaccggctgacccgaatgcactcaacggggctgatgaatggctcaaagtacaatatgttaacttttttaccttatcaggtaaaggtgtttttgatggtcaaggtgcaactgcttggaaacaaaatgattgtggaactaacaagaattgcaagacacgttccaaggtaataaataaactatataactatatagccatttcaattaatctcaaattgctagcacagtcacttctaccaaaacattctaattagctaaatttcttgtaaacagaattttggtttcaatttcctgaataattctatggttcgggacataacttctaaggatagcaaaaacttccatgtcaacgttttagggtgcaataacttcacattcgatggcttccacgtcagtgctccaagtaccagtatcaacactgacgggattcacattggaagatcaactgatgtgaaaattcttaacaccaacattgccaccggagatgactgtgtctcattgggagatggcagcagaaaagtaactgtccagaatgtgaattgtggacctggtcatggcattagtgttggaagtcttggcaagtacccaaaagaagagccggtagaacaacttctagtcaagaattgcactttgacaaaaacagacaatggtgtgaggatcaagacttggcctagttctccaggagcttctcctattactgatatgcattttgaagatattaccatggttgatgtcatgaacccagtgatcatagaccaagagtattgtccttggaatcagtgctcaaaacaggtacttatatgtttaatcagacacgattcttaaatttaaatgtctttatttgtgaccctttttataatcatactggagttgttattatttaaatcactagtattttagtcttgattgaatatgcactaccgtgaggtttcttataccttgtttttgtctattttgtgcatgcttgcaatggcttagactccatcaaaaataaagataagcaaggttaccttcaagaatattaagggcacttcaaaaaccaaggaaggagtgactcttatatgtagcaaaggtgtaccatgtgagggtgtggaactaaataatgttgctcttacattcaatggagctccagtagttgctaaatgtgctaatgtcaagcccaaagttactggaaaagctcctgcttgcacagcttaagagacttgggttgacacattctccttgatcagatttttcttttgtagattcataagcatcgtcgtaaggtgacgatgaggactatttgaagtctatagtgaataagcatttgtatatacttatgttgtcaatgtctaagggtattcattcaatacgaaatccttgtgcaagagcatatatatatataagactgactttctatttactaaagaaaagttctcatgccggtcacaattgctagctagaagctacgaggctttcctgtcttcgcatatagtgtattctatatatcactattatttatattagaataagagtatatatttatgtacaaaaaaaaagagaatatttataaatatgcttgaaagtgtataatatatttcaaaacaaattgttcaggtcaaattatatttgagatatgtatgccaacttcaaaatgaggttactttattatcgaatgataatgaaacttgttgaagatgaagaagaattatcaacaatcaatcacttatccttatctattaaggtttaaatgaaatcatgtttgtgcaggggtgaaaagggaaaagagcacatggtgtacaaacttaagaaatcaatatacatatttaaacaagcttcaagacaacggtaccttaagttcaatgatacagttgtttcctttggatttaaagaaaacactattgatcaatgtatatatctgaaggtcagtgggagtaagtttatattactgattatgtatgttgatgatatcttgattgcaactaatgatcttagttttttaaatgagactaagaagtttctctttagtaactttgaaatgaaagacatgagtgaggaatcctatgtgattgggataaaaaaaattatgtgatagatcacaaggattattgggtttgtctcagaaagcatatattaatacatttttagagattagaaatgcagaactgctcatcgtctccagtaccaattcagaaaaggagacaagtttagtctcatatgcatgcaatgtcctaagaatgaattggaacgaaagcaaatggaagcaattccatatgcatcacttgttgggagcctaatgtatgctcaaacttgtacgagaccagatattagctttgtagttggaatgttgggaagataccagagtaatcctggtatggatcattggaaagctgcaaagaaagttatgagatatttgtaaggcactaaaggtcacatgcttacttataggaggtctagtaacgttgaagtgattggatacacagactcagattttgcaggatgtatggatacaagaaaaattacttatggttatctgtattttttagctggaggaactatgtcatggaaaatggaaaagtgtgaagcagtcggtaattgttgcatccactattgaaactgaatttgtgacatgctttgaagccatcgttcaggctaaatggctgcaaaaatttatttcaaggtttgaattggtcaacagtattgatagaccgctgaaaatttattgtgataattcagtaacaatcttcttttctaaaaacgacaagtattcaaaaggtgttaagcatatgacattgaaatactttgtcgttaaagaagaggttcataaacatagagtgtctatagagcatgttagcactaattttatgttagctaatcccttgacgaaaggattatcgtccaagacatttattagtcatgtatgtagtttgtgcattatgtcagctaatgaatgttggtcattattgtaattattgactattgacactctgaattcaatgatgtttaagtttttaaatattattatgttttcaaatttatatatacatgcatgtatgaatgattattttgaaaaataagatttgtccctaatgaagacatataataatattattgtgggacattatgatgtaaacttttattaaagtatcatattaggaagaagagttaataaagtggtacatggaaggaattatgtcgatttgatagcatagaaccgtcatgatttttattagttttatttctgatcatgatttatgaggagaccagtgtatgaaaactttagccctatgtatgcgcattataattgttttcattaaatcatgaaatgaaagttgtgatatgagccaagtgggagaatataagatttatcattgtggctcatttaaataaatgttatttgatttaatgaataaaggacataagggtaattggttacaaagagaagttattaaaagaataactgttgataggtgcaattatcttaaaatgataactgttgataggtgcaattattttaaacttagtggttcagtttctaataaattgaaatttagaaaactgaatacattcatttgtctgtccatgaaagttgtatcttatccctattaaaagaagttacaagaattgaaagggttaagaccatgagaaaacatcctaccataaaagatcttcagtaatcatggacaaaattatgtttatgtgaaactcatgaattttaaagatcttattcataagatttgatgtgtttgttttaaacagaaattataaatttatatttacacaaaacacaccagtggagctcgtgcgccacgcccaagaactcataatctttctcgactccaaaacattcactcgtgaaagtaaacgcaaagagaaggtaaattaatgtcttccttccatcacataattaaaattacgtaacttgtcttacctgactgtgcattcataattaaatctaagattgttttttttcttttgaaaaggcaattttattgcaataaaaaaatttgacacacaggatgtgttccaaattatcaaactgaggacacgagaaattctagacatacccccgtcaagcacaaggttttaaacagcagtccgcaatcgcaattgcagctgcgacgtcaaggtatttctgcaatcgcatcatgaccctaattgtggttgcatcattcgtattttcttgcaacataaaggttttaaacaacggtctgcaatcgcaattgcagccgcaacatcaaggtatttctgcaatctcatcatgaccctaattgtggttgcatcatttgtattttcttgcaatataaatttttttggctaaccgcaaccatgaccacaatttataaccatgatcacaacagaaaatgcatcaggcacatacaacctgttatttatcaaattatgcagcctgaaaataaaaataaaaaataccagaagctttgctcagaattaataccctaatatatacgactgccaccgctatatcatacttcgcaagcaccacaccagatactcaaactcttttcacgcttcagcaccaacataacatgcacgtacaacttttgaaaaaactgatatttgatactttttaaaattacatcagtttcgtcacttttttaatatcgagaaaaaacacaaataaataaatatggttgatgtgattacaattatgattgcgttgtagttgtagacattaaaaattaaattaaatgttgacgttgcaatcaaaatcatggttgcattactatttttttttatgccatgcattactatattttaaaaccttgattaaatcatatatatatatatatatatatatatatatatatatatatatatataaaatgcatgcgttgcagctatcagacctaagcaaaacgtactggagataagaacggttctttatggaaacggagaatcagagccaaatgctgatgcgtgttctcagatcacatgagagtttttcaaagatgacacatttcgcattttcattctctatgtatcaaatcttaaactcggggtagccatttttatatttcaccgtcagttacattatgtttttttaatttctctttctagcatatttaagaattaattcatatatatatgtcggtaggcacgccaagatgcaacccacgtgattgcaatcttgcaaaggcagcgagttaattcaattcgcaactaattgcttctcagtacctggaaaaaaatatagatcttgtggagatgctcatagacgggtaagaatatttatgggatattccacattgaattttcaaattttatttcatagtttcagtactgtgctggataaatggttaataaaagttgatttaattagttatgagaaagagggtgacattgctttgacgtatggtgcggttgcaagggagtgcatgcgccaccagagcgtagcaaggtacgcgattccaatcatcgacctcaattaattaatataatcatgcaatttattgagttatatatccaacatgaatgcttgtgttaggatcataattcttaattgttaactttcggagattaaaaaaaatgtagccaagcatcttgcatggctgactttggaattttactttctttttcctcttttttaaattctgactagcttaatttatgttttttaggcatattttggaatcagagcacatgaagaagttttctgattatattcagctaccaaattttgaaagagcgtcagatgctgttgcaacttttaaagtatgctaattatgatgctatgtcttttaatttccattcacaaatctaagcctaattctcattatttacatgttcttcattttacttgcattgcattgcgaaaaagtcccaaaatatatctctagtatattgcatacatatctacgtacgttatttatattctatattctatattggacaatggagcaaaaggcataaaggatactgcttttttttcgcattttccgagagaaaatgaaatatgtgatgaaagaaatatacaaaaagaaatgtaagagaaactatcatccataatatatttttatcttgcatcttcttatttaattttcctttgttttatgcgacatccaaacaaataatatctttaaactatccaggcttaattatattgatttgaatgtatgtatgcgaagaactctttgtatttgggaatgtgttttatgataattgttttgtataaataggctttgacatgtaaaactgatatcacaactgaaaaagtcgattaactaaaatgttttatttttatatcaataaatattaatttgttaattttgttagaattgttaattttgaacttataacttcttctctccaactcccttcactctaagtcttcccttttcaaaaaaataaaaagtcatccttatatctccctaattaactaaaatttgtcatataatgtgttgctataataaagttctgggtactactattttgctcttacagcaaattcattagcatgaaattaagctaatccattccctgactgatgtacacaggagttattgacaaggcacaaatctacagttgctgaatttctttctaaaaattatgactgggtaagtacgccaaagtctacttagtatataattatgtcatgcaaaaggtacaagtatttatcctctgtaaattcgagaatgtaaaagcaatcaaggctgtagaagagggaaagaattttcccctatcattgttttatctttttgtaaaagtttaaattagacaatttaatttggtttacaaagatttcatcagttgtctttagttggtggcttcctcggtggaatgtaaggtttcgtaccttatatataattgaggtcaacattcacaatgaggcagatatgaaccaaaaacttattcacattggagtcaattatttgaataaaagaagtcatagcttctttcacaatcctcaaatttattctaacataagtaatttggttgttttcatacaatatagctttttaagttttttgtttttatcaatattttaatatattatcagctaaaacgttttactgtgcctgttagttcttcaaagagtacaactctcagttgcttgaatccaccagttattttactagacggtacgctatcaaggtataaataatttaatctgtggtagattccttaagtctcaaattcatttcagcatcaattgtccattttaactgcttgcattagtcacaattttttatccatttcaccattgtaatcaaattaatatgttacagttattgggggatatgttattggatcgctcgaatgctgctgtaatggtccagtatgtgagctcgttcgataatatgaggatcctcatgaatctcttaagagtatatatgcattatcctatactcaaatttttcagaattgtaaattcatgaaataaaagtacttattaatttgttcactccccccccccccccccaatttgcaggattcaaaataagacaattcaattggacaccttacacgttttcaaggtgtatattgaaatggagcaagtatatattttttaatagattcttctaaactcagtgttcttagtttaaatttaattattttaattgacagctatttgttgcaaatcaaaataagcctcctgagattgtcagcatccttgttacaaacaaacataagcttttgcaatttttggacaactttaatagcgacaaaggtataaagttgttgcttcacttctagggtataaaatttctaattttttaattggtcgcatgagttaactctatccttccttaacttttcagcggacgatcattttcaagcagataaacaacaagtaattggtgagataataactcttgaacacaaggatcgtccatgcacatctttggacaattgtgaagttccatgttgaatacttacagtccggatttttaatcatctttcaatttctccaagtcacattttgctacgtgaagtcgatcgtgttatttttttcttttccacatgtcattctcaatgggaagaatcaaatatacttcactgtgaatagaagatacaacgaatttggattaacttattatttgaattatttatttgtttaactttatcttctgttatatttatacacttgtataagtcaagaacctttccacaccaacaatttctatagcctcattatccgtcacggctgcaaaaaagcatcccagcagcaatcaattctggactgagcatgaagcggatttcctcctatatctgacatttacaagcaaatttattgaacatcaataggctaaaacaaaatgttcacgtgacaaatatctcaacttacaaaattacaaaatgtacacgactgcatgcatatgcttatatcaggaactatggtataaaagctatcataaatacctaggtataatggatggaaacaaaaaacatattgtaactgtgaagtccccatgccaaggacatctcccccaagctttttacttgcaaaatataattcaacggctacacttgattgattttccaagtggcctgaattgagaagctattacaatgccaaagtattaactattaaaaaccaaatgaatcattaaaaaaaactgaaagaaattagttttgctgacaattgaaaatagatttccttcatttaccaaaacattgcatagaggtgtacgagtcgcgccccaaagctccgcctcgggatcaccaatattagagtaatttttgaagggaaatactcttcgctcaaaggagacaatgcccttaggcatatcagaacttatcctttgaaaatagtgaaggatgcacaaaaccttatcttgcagtttttcattcatatgatcatatatatatacacactcctgaaaattaagaaaaaccttggaatattgcaagagaaaaaaaaatggactacaccaatgaccaatatcaatttcatctctatgttgcagcatgctgacactaaaaggatcaaatttacgacaaaaaatgagcaaaggattccttacgcaaacaattgatcaaagttgatcatttgaaggcctttcacatggttgtgatcgtctgggaatagacaaaataatgagcaaacaagaagagtagcaaccaactcctgaaaagcaatcacagttgtgcaatacttatgacttcagaattttcattttggtttagaaaccatcttggaggaaaaaagtagataaaatgtaataataagaaagtaagtaacctggctaaggcacacaaagcctggttggtgcgattccaatatgcgaagagcatcttggtagtgtgcttccaacaaagagatagggcaacctccagagctagcaaatctgccaatgcaggaagcacgtccttaaaccactttctagattgctctatagtcataagctgaaattaacaacgcgacacgtcatgtcatgcatgtactcggcaaaacccatgcacgtcaacttaccttgtcaaagaagaaggcatatccacggatagcagaagacttgttgggagggggagagaaagcttttctgagtgcacaaatggtgcgtgccaagtcatcggtcatttccaagagtgtattatttgaggggattgaatctaggttctcttatacatatgttgtcactaaactatatatattcctttatatgagaagttatattcaattgtctttaagtttaaattctacattttttactttttttcgggataatgaatttattgtgtttctggagttaaggagataataacaataattcaattcaatgttatctttaactaacataagacaattaaagatggtgttatgacgacgatgacattaaccaaatcaataacatttacacgtagaaggccaaattgaaaatctgtaatatatatagaaactaaattatgtgtttaaccttacaatttttttctcgaagtttgggattcaaattatggacataattaaaggacgagtaaaacacacatttcatttgcttaaaaacaaaatggatgggtaaaatttcagaagtagaatgattatggcatagcttcaaagccaagcacaatatgcaaacatcaaccttcgtatctcgtgaagacaatgactataatcaaaaggagtagccgcactcgatcgacataataatatctcgtttgatatactatattgccctctactcccaccactagatacaaattttaaaacccgatcacattgtcccatttctaccaaacgcacaacaccaccttgtctttccttcaaagtcaagcatcaaactacatactatttcgcacgtcaaagaaagaaagcactaacgattctcacttattacgagctcaaaatccataatgacagctagcaaaaattggttagtaagaaataataaaaacatgagtatgatttttattgacgatacgaaaattttatttgtagataatttgtaagtaaatgtaaaaattctttgaattttaatttctatcctaataatgatgaagttgggacccatgcaactcacataaacttttttaataataaaaaaatccatgacactcaccctgaacacaacattgttgttaacaaaagcaagcattgaaccatgaaccattaattctctcccagtctatccatcacagatccacggcaccaccatgctaattcttctttacctctcccttgtgtgttcacttccccacattgcattgtcatcccattgcaccgtggaaaccgccacgaaaacgttcgaaaaatgcatgaacctcccaacccaacaagcctccatagcatggacattccacccccacaactcaaccttagaactagtcttctttggaagcttcatatcaccttcagggtgggttggatggggcattaatcccacatcgcccgaaatgaccggaacacgtgccttaatagctttcccggacccaaactcaggccaaatagtgcttctatcttatattcttgaccccacagtgaagcttcaaaaatctccactgctctctcgcccccttgacatccacctcctctcctccaccgccgccatgtacggaggcaaaatggccaccgtgcacaacggcgccgccatccaaatcttcggcacggtgaaactgaaaacgaacaagaccaagattcaccttgtttggaacaggggactttacgttcaggggtactcgcccaccattcatccaactacttccaccgatctggcttccattgctacctttgatgtgttgtcgggttcgtctgctccacagcacacggatctcacgacgttgagagtgatccatggcaccgttaacgccatctcctggggcattttgttaccaatgggagccatcaccgcacgctaccttaggcacattcaagcgctcggccctgcatggttctatgctcatgcaggtgtgatcatcaacacaattctccatattactctttaatttcaaccattcatatttttagtttgactagacagtaaaaagctaaaaaaagaaaaatataaataatatgatatgatataaaaaatataaatgttaataaaatgtttagagtgacaaaatattcacatatcactaatctttatttgaaggatttttattccattataaaagattgaaatattccacaaacacttcaaatccatttgtttatcaattctttttcttgtgttactttctcaattgagtacatattacaaacaccctcaatgagtgtccacaaaatatatattttttagtgttatttgtgtatcagaattagactaccttaatcctctaatataaggattataagtgatatataaaaaacagaaaatagaagagcgtatgcaatatgttatgttatatgatttgattaaaaaaaaacataaatataaataattaatatatatatatatatatattctaaacatatccatatatcattaaattaatgatttaaaaaaaaaaaaaaaaaaaaaaaactcttcgggcagtcatttaatacttgtttgacaatgacttgtgttatagtagtaattgcttaatttgatgataataagaaattggacggaaaataaatattatgcatgcaggaatacaactgtttggtttcgttctgggaacagtggggtttgtgatcggaatccggctggggcaactgtcgccgggagtagagtataggctccaccggaagcttggaatcgcggtgttttgtctgggggctctgcagactctggccttgttatttaggccaaagaccaggaacaagttcaggaagtactggaagtcataccaccattttgtaggctactcgtgtgtggtgcttggctttgtgaatgtgtttcagggatttgaagttatgggagccagcagatcttatgccaagttgacttactgcttagggctctccactctcattggcctttgcattgctttggaggtcaactcttgggttgtcttctgtaggaaatccaaggaagacaagatgaggagagagggactcattggaacttccgacaaagccagtggaagtgccatccacaattaacattcctcattattactctagtatttcatttcattgttccttaatttctcttttaattcattttctatccaatgccaagttgtgcaattataaaggttttgaaatatacttcctttgtctcaaaatgaatgttgtttaagattttttcatacatatatgtcaaaaaaaaatatattctaagcgaattaatattaattaagatatcattcaatttgaattttttttcaaagattaagaagtaatacatacatactttcactagcttctattaatgtttcttagcaatagttcaaacatgacgcatgaattaatgatcatttgggagttccactgcgtcgaaaggtgatgcaggcaagaaatcattagatgatccactattattacttattcatgatttctatcatttttatataaaattaataacactcgattaaatgtaatgtaaaatttgatagtgaatatgtggtccaaaacctttataatttctcgcatgccacggggaaatgtcaagtgtccagtccacacactcccacactactatgtaaggtttgtgagagcaattggaggattaaagcggaaaagagtgaatttttttattgggctagcattaataccttcggacaactcaaattcacgggtattaagttgcaagttgaaacatctcctctccacttctaaaataaaactttgagtattttgaaattagcttctattaatattcattaacaatttttcaatcaactagctagtatttgctttaagagtaattttacttcataatatctaaaccatttcaaaacttaaaataaattattttatcatgaattcttttatttaagtccaaaaaaagtccaagtagccaagcaccacacaaaaagaagaatggaaagtcgtacgagaccatgtctattcctacccgttataacttgtatgttattcgatattcgttgcttcccactatccacttacatggcttttttttaaatagaaaaaaaaaaatcccagcagagctataaagaaatcagtcaaatgacccaatgtagaaatagggcaaatgaaaggatgtgtaaacggcataacatatagaaattgtattaaacaaatacaaaaataggaaacaggctcaaacgaggagggaagaaaaattaacaatatagaaggttttcactttattcgacttcatgtcttctgacttctggggatgtaatattactttccaaaatcagccaacacattttttcttttcctaataaatatatttgtttggaatgatgctttcgaagaaagtttttgtttgacaaatatttaaagcaaaaagaatctcccaaagtcttttgcttttgatttgtctgtctcttgatctaaactaaaaaatatcttctataggatatgatattattcgactcaaaaaacatttatatgatgataaaattaactctaaagattttcttttctatacacaactggaactcgaaagacaatttttatttagtaaaatatactgagttagttaaaatgttcaaaatatctttaaaaaggaaagaaaggcaagcagaaacagattttagaaaataacaattgaatacctttttcaaatattttgaaagaaaaacaagcaattttctaaaattgcaacaagtcaataaatacaaacacacaaaaaagtcatttttcagctaaaacaaaaaaaaataaggaaccaaatttaatcgtttatttggcctcattatttatttatttaatttaattttgtctcactattaataaatgactcaatttggttccttaatttttcaaataccatgcattttagtaatttttcgtctaaattggtctcatgctgttagaactttttacaaattaaggaacctaattgaatcattttaaagatttaagagatcaaattgaatcatttattaatagtggaataaaactgaacaaaataaataagcaattaagccaaaaaaaattgtttattaccatccatcaaaaagtcctgcaataattagatatttagaccacaagagttaaattaaagaaaaacaatatcttaaatgcctaacattaaccctcaggaagattgaagatcggaacagtttctaatctactcaagaaggatgtgctaaacaggcaagtacaacacctaaatccaatttatctatctatctatatattttatatatctatacttaaagtaaaggaagtttgaagtattttaaaccattatatcaagattttaatttcattatcatttttaatttgatttaatcttatttagtcattgatcaaaagttacaatacacaataactattgatttagtttaatcaaatagaatattagtgaaggattaaattgacctcattaatgtaatttaaaaaaaaatatttcactttaattattaattaaggatagaattatttttaacaaaaataattaaagatataaatttagatatatatatatatatatatatataatgtttcatatgaaaatgattttgttatgtaagaatgagaacattcaaattaaaacattatttaattataaaatctctaagatttattaaagaaaatcaaatattttaaagatttaatttacatcaagatcgtcttcacaatcaccattattgtcacaaccatcatgatcgaccaccatcattatcacctagataactgccacaaatccacctacatgactgccacaaatatcatatttaattttatggttaaatgatactttaatttgaatttaaaatattttaattgtgacttttcattttcattttaatttaatagataaagagaatggttgttctaatacatcaaacacccactgaacagaaaatccagtctagtatttctaaaagaattaatctatatttaattttttgattttttttattgggtgcattgctttattaatgacgcttacaaagttctacaaatctatcttaaacgatttagctgtgttaagaatggcaatggggtaaactaaactatagtattaaaatatctataaaagcaagtgtaataaaatactacatagttcacaaaatttggaaaatattcaaatggggaaaaataaatccatttatcacatacagtttgaatttgtagcataaaatattcccctttagaaaaagaatcagaacatatggtaacttattcacgggaccctagatgggtatcccttcaatgtttcacactagtaataaacaaaaacctcagatacaatctgctaaaagcaaaccaaaatgaacggatgaagaaacaaacaattcctgagaagaacccacaactttgcaagacataaaaggcaaaaaatctacccaaaaagaaaaaggaaaaaagaaatgctgtctgtccatcttttttatattgcttcctcacaagtgatgcatgatacacttccgctatatcccgcaatcagattttacatctcactcaaatcccataacctaaacagtaactcaaaaactcaagccttaacattcccttgtaatctatctctatatctgaaccctcaaaacaggcactccagttagctctagaaaaccaaatatcttgcgtcttaaacccaaattcagtaataacagtggtgtgcaaaattcacaattcacctgcttcactggattatcttcacctacaagttcgtgtcatcaaaacgatcttcctatgtagcgattcctgaagtaaatatacaagtttatcagtgttggcatacaagacaactgaatgaaaaattgaaaggacacttcacaagtataaagcatcaatatttatttccatccaatttatatgttgatgtgaaaaaatggagcactacaaaggaacatacagcagaaagagtataagtgaattgtagtcaagttttgctaaaagacaaaagatcaaagataaattcatatcataaagaacttccataacttaccaagactaaagaaattgagattcattgttggaaaaaatttgaacatagataacatatcaatatatcataaagaagaaaatgatgtggaacagattctactctattacaaagaacttggggttatatcagccctcttgactaactattaaacatcaagagggtaaaacttcttatattgccctctaagtgtgaggggtagagcaccaggggataacagacaaaaaaaaaaatcaactctcctatgaagatttgattgcatgcaaatcatgattgcatactctaaacgtatgcagcaaaacatctaaaatctatcagacaattcagaaggaaaaggacatcgaagaactagttctagtatgatgtttacatgacatctatgattgctatccagaagtcagttttcttcccctcattcaaattttgtgaaagacactcgaaaaaagaaggcaatactgttgaaaagagcccggaatatatatctatatatatgaaaatgatcatttctaacaattcaatggaattatgggcaacatgtttacaaattttttctgttttttttttctccatctactaactcacaaaattacaatcaaccatgcagattttgaatccacagatccatacccaactgttttcattggaaaagatgcaattagacaagagtcattatgataatctccattgaaacctcacctttattaagttatacagcttctacaacttctgttcatgaatgaagtaatacttttagtttgagaacttaatttcattaaaatacttctgcatgtgcacattgtaaaagtatgtgtaaggttgagccttgcatctagcagaattcaaactctacttataccaataaacatctgaatcactaatagaaactttataatatataaaagcatatacccctccttattcttttctataaaatataaatcaacattttgaaattatgagtcactatgaaattagaggaaaaggtgatggagcatagagattaagagaagaaacaaggattgtagagaatcaatttgattttatgtcacaaaggtgttatttctggttgacggaaaggtacagtaataaagagacttacatatggtttttattgacttggaaaaggcttataattcatgctatacaagacatgtatgaagtggtaactactagtgtgagaactccaagtggtgaaactaaggactatcctattgagacaggattacatcaaggcttaaggcttgagtccttacttgtttaatctagtcttggatgcttatcaaggacatacaaaaaattatcctaatttcatgcattttgcagatgatataatcttgattgaggaatcaagggaagcaattaacattaagcttgaactttggaggcagactttggaaacaaagggttttgcttgagtaggagtaagacaaagtatatgcattgcaattttagcaagagacgagtaatatgactcggaattaaaaattgaataagtcatatcacagctttctaagtttaaatatttgggttcaatcatacaaaatgatggaaaaaatatgaggatgtcatacaagcgggatggcttaaatggagaaaggcattgagagttatttgtgatcacaaagtacctaccaaactcaaagacaagtttcattacacaattatacgtccagttatactatatggcagtgaatgttgggctttaaagggacaacatgagagaaaagtgggagtagcaaaaatgagaatgtaaagattgatgagcagtcatacaagaaagggcaaaatacggaatgactatatacgagaaaagtttggtgtggcaccaaatgaggaaaagatgacaaaaaattggttaagttggtttggaatgtacaaaagggcccacacaaggcgacaattaggagtatattgcatgatttagtctcgtgaaaagggaaagaggaagaccaaaagggacattggaggaagttgtaagaggatctcaggctaaatattattcctaaagcttcggtttttaaccgtgccaaatggtgttatgtgatccatgttgccgatctcatctagtagaggctttgttgttgtttaataaaactataaatcaacactgtgcaccttgcttactttcctcgtccctcaaactagggacttttttttctactgttaggtatggtagaaagtccatctataatctgaaccccttcctcctctaaaccaagccatgctaaaacaaagttaggttgtggaacaatgacaatcatatacatatttatgaaggttaactttgcttgtttgttactttttgatacctatgggacctctcaattttcacatccttgaagtatattccacacaagattagaaagaaaacccatataaatgtagttagaattctggcatctgaatgacattatggttatctaaagatgtgctagtgttccaagaagcttacttatacaacaaataaggcacacagatacaataattaagggaatggagttcggaaaacaaggaatggggcaaaagtataatgaactcaaacatagataattacttatttagtcaatgtcaccccttctattgaataaccacagagcaataatgtccgtgattgaatgtcactgaacactgttctgagaaacaagctttcaaaaatatgcatccacaacttcacctaactatttaaatttaagtaatgggttgaacatagtataaacaaccaattacaattgttccattataatagcaaacttaacaaagaggataaaacattaatcagagatcaatcagataacatttcctcaaaatgcctagtatctagaaaagggcatttgtctaaattattgtaactcttacccctatttggctgcctcttattaacagtgtaaccaccaacataaccaggagaactcttggcagaaacatctgaagctgtgccaccaagtccataaccaaagggactagatccatctctctcagaatttgaagatcgccaagtggggtccccataaactgaactattattgtaaaagtctgcaaaagccccatcaacaccgccatttgatgcagagtatgaagatgttggtgcaaaagtggcaccagtgcttcttccataccctccagtccccaaaccataattgttgtcaccacctccatatcccaggttgccactactttgtgacatattgttccctcctccctgctgcccggaaattgctgaagaactccagttgactccagtgttgccaaatgtgttccctccaacactcccactccctgatccaatgtatgcattggagtttgcagaacttgttccataactaaggccaccattaccccacaaatttcgagtcacagaactgaagaaagaattgttacctccatttccactctcatatccaacaggactgccaaacctattggagctgctgataaaataaggatttactccccgatcatagctaagattgctattgaaatttgcattccctccaaatccagcattcaaaccaggttcaaaattcatgctcattccataacctgatccaaatgaagcaaatccacttcgaccaccggcaacaggactgaatctatcatccgctcgaagtccatagcctgcaactgtacttggagaatacccctgagtgaagccatttaagaaactattgaccctagtaagaccatagttatatccaccgagtggggtgcggcttggtcctggcgataactccttaggaactgctcgcttgacctcaaccattttaccattcaattcatgaaatgtcttaagtaagaccttgtcaactgcctcctcagaatcataagtgataaatccaaagcctctcggcctctgagtgttgtgatcatacataactacaacatctgttatagtcccaaactgatcaaagtacttcttgaaatcactctctgtcactgttgatgctaaacctccaacaaatatctttctagtgcgacctggaccaggagaaccatggatgctgccactgtttctactcagtatgttctgatcatccctaggaacagctttcttagcctcaacctagcaagagaggaaacagtattgagtatttactgtatatcagaaaataaaaaagttttcaagatctgtcaatccttatgacagatgcttagaaaagagaacaataacaaaaatcaaaagattagagaatataaaatatgtggaaaaatttaatgtactcctgctccattttaaaatctagctaagatattttgagattgtgaatataacaacatttcaacatcaaaactgctaccttccaatgttgcataattcaaaaagagaaccttaatgtcaaaatgcaaactttagacttaaaagggggaaacaagaagattaccatccttccgtcaatgctgtgcttctcttttatgactatttctgcaacagctgggtcagaaaaaacaacgaaaccaaatcccctggctctacctgttgtccgatccttcattatcactgcttccacaacttccccataagtactgaaatactccctgagtcgctcttcatttgtgtcccatgatatcccaccgatgaataacttgccattatctgattgcattttatctacaagcaaaagacacgcctcgtccaattagcatttgagttcaaaaacttagaaatgcaagtggcagcagcgtcattagaaatggacaaagccaaccttctaaagcacctaaccatagggtataagaaaaaggcgtgttcctgatggatccaatccaattccttacatatatctataggctatagcaaaattttatttcatttttttaatgactcatagaaaacaagataaaaacaaaatcctggtgtgggatgaaatgcgcacaaatccgggtaggataaaatcaaaaacatgatagcattatcatttaacaaaatgttgaaatacaaatagtccctagcacgaccaaaaaaaaaaaaaaaaaaagcattacaagcaataccataaattaagacaaactgagagactgtattaacgatgcaaaaatagatattgtcggaatcagttacgaaacaacggatccttcatcaacaatcatcaagcagtgaatcaatgaagggaaagcactcctggagaaaacccacaaaaagtttcaagaatcaaagatccaaaggcggacccaattgaacaaagatcaaaacttcaatcaagattccgtcgaaacccaccgattgaagacgagatctgaggggaggcacaatgagattaagaacagagggcaggttcaatatctggctatgcctccccacccttttttttttcttcttttttttcaattattaatttgattaccaaatgcaaattcagttgtcaaaccgattgcaaaattttatgaagaaatcaaaagtacggagagagaaagagagaaacacatcggaagaagtttgtaaggagaaagccgagacgagaaagaagctgcgagatgtggtatgaccattatatagtgcctctgcaaatggaagatgatgattttctttcttcccttttttctatttttcttttttctttccctattattattttttttaccagtttgatttcaaattagtgaagaataaaaatgggaatctagtttttttgcttcttatttttacctgctagttttaaataaaaatcatgttcaaataatttctgagatcattaccaaaaaaataatttctgagatcgttgttcttttgtctgattgttttttgaatttacttagttgcatttattatctaaatctgtatacatcagtaagtattaaaacaattcaattttaatttatataacaatgtactgaaatgggatattaaaaaaaagtcctgtaaattttaaaataaagaatataatgactcataataaaaattaagacatttataatcaagatttgatagtttaaatttatatcataaagatttataagattaaaagtaatttatgaaaatataaaacttgaaaggaaagagaatataatgacttataataaaaattaagacttttataatcgagattttgatagtttaaatttagatcattatgaggatttataagattaaaagtaatttatgaatataaaatttgaaaagatcttatggatttttaacaaatgtttaagattataagagtcaatgaataatataacaaaacaaatataagattttaataaataaaaaattaaacaaatatgattttttaattttttatgtgaatcaatatatttttagaccaaaagtcaatgactaatttttttttgaggtattaagatcctttacataatgaatatctctcaaaagatatttttcatacataaaagttaggaaccaaaccattatcacattgaaataaaattatctaccaatcacatctttaataattaattataattcttttttctttgttgtttctttcttgtgactcccaatttgaattaataatcaagttatttcaaaggagtagttactagttatcatatcaatcaagaaatttaatatcacaagaatacctattaagctaatcaagtaatattttgtaaatatttgtaaataatattattctaaatgataggaagaaagaaatgatcaataattgtattgtcttcagctaaaggaaaatatataatgtgtaatcggagaaagtatggaaaagtctaaagagttcaaatagattattagatgagtgtaacattcaatatcataatatttatactacttgaaaatcttgactaaatactataatatttctttatcataaaaggtcttctaaaatcatttaaaaacacaatcaaatacactcccttttaattgcatttcaatgttcttatgcttttatctttcttttatgatttttatttttccttttttgtgcattcattttcttcttactttattggtgtttatcaacgacaggttatcgacgatcacaaatcctaaaattggaaaatctttggtattgaccaatgataaaatgtattaaaatttgcccatggttgcaaatcataaaaatgaaaaatctttagtattgaccaatggttaaatgtattaaatatgattaagtaaattacttaggttctatttaaataaagttctaaaaaaatatttatagaaaaaataagaaagtaaaatgaattgagttattcctataaactaaaatcaatatgtgtacactttagttttcaaagtagttaaatgaaaatgttactataaaagttaaatgcaccactaactttaatattttttatcgactatgggactaattctcattttgtagtttagttaattcaaagctcattgtccctcccaaaaaatgtattatgtgggaaatacttattttcttatcctgtaaatatttatagcaaaatccaaataagaccttaaaaaaatattaaatcagtaggacattggtccaattgataataaaataaaataaaaatattttttataattagaaattatatgaaatttattattatgcaaacattttagtacgtttattagaccaaatttaaatcatactttacttttatttcttcaagcttaaattttgtattcacttaaatgtatcaggtaacttattaggtcaaagttggtttgttaacttcaagaaaaattcaaatatccataatataaggcttctttttaattattgttttcttatttaatgtgtttttattttcttctacttttattttacaacatgatttttttcatccttcttttttatgtgcaatgtgtttttttctttatttgtgttgactgtcaatcaaaaaagataaagaaaaacaaaatctcttaatactaacaaatagtaaaatgtattaaatttgatgtttttttttttttttacaataatcacactaagatttgatcctataacctcaactcatgcatattattccaaactctcatataggccaaccttcgtggttcttaatgagttaattcacttactcaaaatatattgaataaataagtcatcgatcaaattgcataataaaaatatatataaatgttttacgattaaatttttatattaaaattattaacatgtatgtatcttaaattaatactaaattttaacttttaaaaaattaatactaaatttgaatcatattttttatgcttaaatttgttattcactcaaatatatcaagtaacatattatatcaaacttggtttattagtctttaaagacaaactctaatatacaaaaaatatctcaaaggattgttttttacttttgttttcttattaaatgcattttcattttctttccctttcatctagcaacaagataatttttcttttctttttgtacgcattcatttttattttttttattttttttactgccattgagtggcaaacataaaaatggaaaatgtttgatattaactaatgttgaaatgtattaaatttgattaagccattagttctaagttctttttggataaacttcttgatcaacatgaaaacaaggtaaaatggattgaatttcttttgtcaactacaatcaacttacatactttatttttaaaaaaatttagaccagaggatctctataaaagttaaatacataagataattttatcttaagtctcattcattttatatttttgtatttacttatccttcatagaatcttttaagattgattcccttctctttttttttcttccttttttttcccttcctttttttcaacctcctcgtatctattaatgagttcatctactaccgaccccaattattttgggttaaagatgttgttgatgtaaatgtttatgatgttgacttatcctttatagataaatttatctaaataagattggtcaaaatattgatttagtaagtcaaatgttgcattgtataataaaatatcaaataaaatatttttataattaaaattttgtataatatttttatatcaaatattttagtgtagaccaaatttaaatcataagtaactttatttctttaagcttaaattttttattcattcaaaggtattaagtaactaagtagatcaaagatgatttattagcttaaagaaaattctaatgtccttaatataaggatttttttgtatgtaacctagaaaataaggattcttgttttactattgttttattattgaatacatttttattttattctacttttatcttgcgacaacatgacttttttttcatttttattttctccaatcaatcatttttcttcttctttctttcattgtttgcattgacaatcaatcacaataaaaaaatattctattggtaccagcaaaaatattgaatcatgctttttaagcttaatttttttattcattcaaatatatcaagtaacttttttgatcaaagttctttctctccaccttcctttcttcttctcaactctcttttttctttgttcatagttatttctttctccttcttttttttttttgaaacttcaatgaaggttttcatgccattttttgtgaagtcttaccattcttaagcaaggtgctgtggaaaaaccatctcgcacatccaccaaccaccacaaggtttcttccctgcatccaccaaccaccatgaagtcttttttctagtgtacaccaacaaccataggtctcctctcgacattccatttcccttcgcgtgacctcttctcttgaaactgacataacccacccgcgtaatccgtcaaccgtgttacttgaattcgacaaatttcgaaggtccaaacggttggttgcggttcaacatttgaagtggttgaatttcaacattttaagcattttctgcccgaacccaatcgtgaccaaccgttgcttacccctaatttggaatgaaggaaattttaatcgttctaaataatcaaacaagactataaataataaatattaagatttttttgaatttttatctaatagataaagtgtagaaaatgtacatatcaaatatggagaaaatgtttattgttaaattaatttcttcctggaactcattaacatttaatcaattttacacttcaaaaattaacatcaatccatgaatcagttcataagtacactcaaacttgcattccttgtgtgaaagagcctaattgtccttgtaaaacattaatactttagatgacttaattaaggtacttgctttgagattcaggatcttaagatgactaataaaccatgccttgttcctagcaataaggttcattaggtgttcaactttagttcaaggtttaaagagtgttttccaatacgaatgaaattaaacatcaaaatataaatgatcaaatcatacaaagctttaagcatggaataagaactaatattgaagtgcaaaatcaaattaagttataaatagtacataagagtcaacttagttacatccaaccccaacaaggatgagtttagctcctcttagacacatgtagagccaaaaatgagtaagaaatgaagaagatggatgaaggagtcatgagagagctttcaactaccatacaacatccaaggcaagtccatgtgagaattaggtcaaagtgttttgttaagagacacattatttctcatcttgttctcattaagtgacatgtcatcgtgtttcatttagcaatataaatattacatctatagaagtattctttttaggaagtacttgctaagcgagttttgatcaagctatttaaaattttctgttcactacaagaaacatgcatatttatgaaatgccttttcatcttctgcttttatcatgcaataacatgatttttttttattttgcttttttaatccattcatttttcttctcctttccgtaaaatgaataattaaatatgtattaattatttaaatttaatatgttaagaaaaatgcataatccattaattaaattaaatataaacacactcttacagtcttactcattttaaaaaatgttaaaacgagaagagtcttatccaaattacatatacatcaagctcagcatgcatgttggaaaagactacgacaacgtggtgaaggataaaacgaattaacagtggagtttgataatttgagaatagtgcaaaaaaaaaaaaaaattatagtgaaatgttgttggtaaccttaaactcgaagaagtagatgatgggatggacatatataacgatgcagcagaaatggtagatattgatatggcggtggtaaatttaattattgaacagagttgggtcggagcacgatcctgtgtcacgtggaggatgaaggaaaacacatgtacacttttctcaagtgtttttagtattaattcttaattaaaattcaaaattcatttccataattagtattcactttttaatattaccaatggatcttggttgaggcttgttccatttttacgaataaaaaaactttaatattgacttttagtatttattttttatacactatcatgtaaaaaaaatattgttagtcaattaaaattactctaaataaatttattaaagtaattattataaaattattggctaaaatgggagctctatctcaagatcgtctcacgatttctgattttcctccatcagaaatcaccacgttattgttagctgatttagtgggagtagctttcacaaggatgtagttttttatttttaataatttgtgctcctttttccttttactacaaaaaaaaaataactcaataatcttactgtacatgataatttattattaaataaaatatcaattttttatactatcaatatattttaattattagatgaatataaaatcaattttaatatttttttaaattcaattttaatgttttaaaattcaataactaaaaataaatttatattataattttaaaatataattgttatattaaacgttcacttatgaaaaattaattatataaaattaaatatttattgagtacagtgtataagttaaaatgctagttaaattttaaaaatattgtaagtaatttgggtagaataattaacattatttcttctcaatttccagttttcaataaccattacctctttttttttttttttccctttccttttcattcctttattaacgtgactagtgagacataaaataccaacaaagaaaaaagtgaggcataaattaagaaaacccaaacaagtactattttcttatgctagctggagacattaaaagttttttgaactatataataaaaaggaacttaatccgaatatgttccctcccaaatgaaacagatttttaagataaaataaaatttatcctttactcaaaataaaataaaatgatattttcccctattgaaaaaaaaaaatgacttgatttttttaaaacagaaaatgaagtgatttaaataatatgttttacctgcctcgttttttcattatattatttgggatatatataatgagaacaacatttatattaaaagtatgagaattataaatattgatcataccaccatacaaaaacaattaagataaaaaatttgtataaaataattcaaatgttaatagttacatgacatttaaaaggatacatgcgtttattatttaatcgttaaccatttaggtaagacttaatgatacatattcattattttgatttcccaaataattataatattcagtcaaaaaaataattataatattctcacctgagccgtttttcagttatcttgtgaaaaaaatatggcaatgataaaatctagcaaagatacaagatatatgcattaaatttccttgctttgcattgccaaatctgttgtcatttagaaaaggctaaataatatgctcttagttctttacgttatctataatatttaatttagttatttatttttttaaaaagtttaatgtaatcatttacgtttttaaaatgagtttaaacgatttttttttaaataatgatcttttatttattttaggacatgatttaattttttttaactaattggagacttaaaatttgtctcgttaaattaacttccatgaaattatgaaacacaattgatccaactgaatataatctaaaacataaacaatgtatatttcagcttcgagaaagaagaaaaaaaaggacaataaaggcagtgcgaacgttcccctgcaattgtctagttgactttcttgtaatacaaaaggatgatatttttgtagagtgaaaagatgatatcatttcatatatgctaatcacagttcacacgtcataaggatttttttttcgcctatagattcaaaagataataagttgcagtgatcaaaataaacggtggccaccaattgagattataatatttgtaaggaggacttaacctgtaaatcacaaggaatctgtctcgtacaccaagaatataagaatatctaataaacaaaaaaagaaattgagattaccttaaagcgagaaaactcacaaaaagtattcagcattaaaaaaaatgcgtagaatgtagcctttatttgtttgatgcctgtgttttcggttcaattatgaagcttgcaaggtggaacaatagaaaggaactattcttccaaaagttacaagtccatcattggttacccttgccatcgactgacatgttagagagatagcattgactatataattaagggtaaggaggtccgacttaagggtaatattatataacaaaaaaaatctcaaaaagggattaataaattggttgggccaaatatgggagttactgaaagtacactatgaatgaagtttggtgtttttaactttttggctataatgcagtaattaatgcaccgtttcataatgaagtgatatttatggttctataatgtttacccattgtactctaactacgagtgttttctattcagttatgctaatttagctttgtttatgaactgtgcagataagtcactgtgaatcttagtaaacaaatgctcatcttactggtgggtgattaaaccattcaggagaagcttttggttcagtgcttcacatcacaccaattgttgatactgtaactaagttgacagccagtagtgaattatgttacaaatgtgccttctttactttgaggaagacaaaaagacagacaaaactgattagtgggttgatgtctgcatgcctgtcaatgtcagccaccatcactatgccattgtccaagatgcaaatcatgcaatggagctgcaagttttgtggaatttcacatggcctagttatatatatatttatatatatatatatatatatatatatatatataatagcagagtttcttcatgatcctatcatgtcaagttaaaccaatagtgttttgtactcaaatatgacaagttgaagccatctgaaccccaatcttttttgtcagctcttcaatgttcaatatctacaaccttatcctttatataattttaatggacatatatgttatgaatgttaatgaagtatattagcctattaaatggccattaacattttctttcttttgttccttttcattctttctttctctcaccccctcttttcctgtttacttattattttcaatgaaatgtgataaaaggaaaaagagaattgagtctccaactctacgtggttctatttgtatccatattcatacacatcaatagtaaagttcttatgctacaattacttggacaattgactaggagttcccggttttctcttcagtttccgacttccagacaaagttatgcggcgaaagaccttgagtagcctgtttgcataccttctttgtgaagcaaagtttacagaactgatgcaactagtcgcttgtccaattgggttgctccttttgctcagtgatcgagtttctaagccacacggcttcatcttctggcttttgatcaaatttggttctgcttttgtaacaatgttgtgcaatttaaggctttttttcaaggacatgagttcttgttcaagattttggattctgaagcttgttgactcatattccgtagttgagaacttgaaattctgcatcacattgtctttctgcagcaggaagctcaatggcctgctactgagctcaggtccatcagtggatgggctctttcctagattctgacttgcagaatatggatacctagagcttgataggcttcctgacatgtctccacaatgtgcatatctaaatgaatctgagcattctttgaaggctttgtgtgtattgagttgttgaacaaaaagtgcttggacaattagacgtagaggcatcaattcgtcttgaacagcttcaatgcatgcctcttgtgataacctttgacagtccagatacttgcacacggctcccttatcatcttgggaaatacctgaatgtgtctacaataaataaataaaaagaaagaaaaaagcgaaatatgttaaagctgaaattgtattgttcttttttaatgattggtctttgacataagttgggaaatgagctatgatcaacttttgctaagcttgtaaatagtatttactcattatttctcttattctaaggaccatgattattgtatcattcttgttaattattcagttagaccactaggtagaatgctgaacattcattatagtgttcagttcctaaacggatagtattattggcatgagagcatgtgtaatcaactaatgtagtttaattgatgagtcctactttttaagaagcttttgaggaatgctgaatgcttgcttaccttgagaaagctgttgattgttttgtaaagggggtaatgattctgtctataagatggtggtaccctttcaatgagttccatgaatctctttggtcccatatctggatctgcagctattttgaataaatatgcatcccacaactccgcaaccctgtaattgctagcttctggggtatggtttacacgtgagctagatgctacatatgctgaaattatgctttccatagtcaccaactccatgctagaggacattaactctgctccactttctggaagaagaaaatcctccacttgagaaaagtgcaaaagtgatgtaatttggtcttgtaactttgccttgctttcagtcctcaaccccaactcaagagatctagaaagcaaggcaaaataaaaccccactggaatcactttcctagccttatcacccactggaagaagatcaacaacaccttgtagaatcacagaagctttgctattcatgccaccctccccaatcttgtcacaggaactctcccaaaattgacgcgtctttttagagagcacccatttgtttgcatagaaaacaatgatgggactcacatacttctccttcattccttgtttcctcaaagaccctataacccttttgaaaaagccaaagggtagagcaatcagatccctcatccacgggtcttggctcacagcatcatccttcattatttcacagctccaatctttggaagccaactcttccactgtcacaacaggagtgtctctccttctttctggatcaagcacctccatgcatgccatgaaggcaagagattcaatgcagcgactcactattaacagatcttcagaccaaggaagcagcatctggcacctttgaagtgcaataagggtgtcatcccaactttgcaacacaacttgattcagataaagatcaaaccgttcacaaaggttgcccgaacagtgatcttcagtcatttcaagaaactctgctgcacacctaagggccacaacgttaaaagggtcaatcaatgtggaggatccataaacgaacatggcaatcatctcaaaggtttctggtcctccagggaatgtttccggaagctcaacctcagacgcattgtttaacctcttcttgaagtatccactctttgaagtcaaaggaaactgcaataaacacaaaatgcaaatcaataattaaggtagttactggtaagctatgtgaaacattcttggattccaattgtgtctaaacttactttatgcaggttgaatatcttgtctttaactcgaacacggacagaaacaggtaaacctgtttgttggctcctgtgacaaaatatcgaagtgcatgagataaacttcggacatataaccacacgtggaaatggaatgaatgatcaatgacatgtatatattaccatgtgatgaccttgatcttgagcaaggctccaatgttaggtgaagagtaaggactagaagcaacagaataatcttttggactcacaacctccatgttagtgctacttctgacaatggaaggatgctacttattctaactgtgactaaacgaatgcatatgattctgaatccttatctggtaaggaattaactagagcagcagagttctgatgttaaagaaagaaaagtagtgtggtgaagtgagatttgaggagtttgtccccaacatattcttgctggatttgtactattattcaccttgcagtagtcaaagtcaacatgcacacgagtgaaactcgaactccaaactttaaggcttcaaaaacgttctcgaatgttgggtacttgaattcttgggctacaacttggcggcctcggccaatagaatagggtgacttttcatgcatcctaacatctcaatattgcactttaagtttgtgtatgtacaaccataaaaccctactcctaaaattcatgagtattatgttaaccagccatcaaattaattagttaatacttagtggatgaatcaattggtatgaaactatttcagtttgataaattatttcgaattttagttttatatatgtaactatattaaatattatttaaagaaaaaatattgacacttataatgatattttttttttgtcattgaaaatcaaataaagtataggagatttataacacttacatatatatcttatttaattaagagaattagacccccttagttctacaattgtattactaaactaacataggatacccaataacctatactagaaaattagttaatattttattaaatatttttaattatttaaaaatatgtgttttgcatttttaacttttttttttgtttatttgcttaattagtgtcattgtaataattttagtcttttagtataacgtatccaacggctgaaactttcagtctcgattgtctttgtcaacgtatagggccttaattgatggctgatgaggcatttggggaaatgatgggaccaaacagtttacacaaagttacgttggatttggtttaggttttcataaaagaacaatttgggtgtattgggaaaaaagaaatgcaagggtatgaaatgaaataaataggcaattgaggaaatgataggattaaaatattgcaaaggaaaagaagatggtgaagtgcatgtgaagttttgtggttcctttatgtgccgtatgcctaacgcccaagacggcacggctactcaaattggggtgctttggttattgggttttgcttcctttcaaccacggacccctggatccaatattttacttttccccactctttgaaaagtacatgatgcgttgcaaaattgaatttctttttttggattttatcttatttagtaatagcatgatttatgttgtgtttataaatttatatttatattgtagaatatttgagtaaacatgtaattctaaaatttgtaaagtccattgtagcctttcttcatgattcttgatcgtttacatatatgtgtgcattctcatttttcagatacatgttcaatgattaaacatacgatacgacttctacttagactggttaatatctctcagtgattgaagattttgattgtttctgtcaagtgggttaataatgtacttatcttccacttgtttggttaaatatattggtttgcatttgttatgtggttaaacaatgattgtgacttctacttagtagttgagctttccttagttgtcattattgttcacttgtgtatttgcttatatatgagttcaacatcttctcaattcctaaattgtttttttaagaaaaatgtgaattttattaaactattatttattattgcaagtcacgaaagagatacataagtacgagatacaatttttttaaaaaaaatgatgcacgaaattaacaatcttcctagacccttatacatccattatagaagggaaagtttctatacatcacaagactccaccgacagggaaacaatgagcaccaacaattatgatatcgaattcagacaaagcaaggggttagaaatccattcaaaaaaaggaaaaggatgctcgtggcttcttagcacctgttgtatacacggttctgcctctctaaaaattacatgattcctatgagttcagatagaccatagaacaggcatccaaattcccatccagcacaaatggtccatattccctctacaaagcccatggtgactccaaaggtaagcaacacagattgtagggagagcttgttgtaggccaagccagccataacagctttgccacaccttgtatgagaaggagtaagaaaaaacaaatgaaatgcagattcagtctcagcattacacagtttacataacaatccttcctcagccacacctatattccttctcaacaaagcttccttggattgaattttgtctagtgtcacacgccacctaaacacaagcacctttgatggtgcttttaccttccacaaagcattaaaaaaacttgagtggtcatcaatcatcaagttttgaattagtgtatatgctccctttatcgaatatccctccgagggtaatactctccacaccaccagtccttttcggtttccaaatttgtaatagctgcagcagttcttcttccatagggatttcccattccataaagggaccaggaccaaaccacttacacaaaagagctttgttgaatgtttatataagcagacaatcaaagagattggtctgtaatcccccagaccttgtggagtctcctttttggggatgagcgcaagaaatgacgcattagcaccaactgaaaagcgaccatatctacagaattctgccatgaccctcataatgtccgagttaagagtatcccggaagtgcctaacgaatttgaaaataaatccgtcaggacccaggcttttgctcccctcacagtcccaaatcgctgccttgacttcctctttcgaaaagcttgcaatcagaccaacactatatttgatcatcaagtgttggaacctatcatatgaagacaaataactattatacctctccttaacaaagtctttgaaccctataaccatccattctccttaacaaagtctttgcagatttgaggtgaactcaccattctcccctctcttctttcttccgtccttcttactgcgttattttggtttgtattatttatctcatgccgtaaatgttaataaacaactaccaacttgggagggtgttggatatatatagctagaattagaaagttgttagttgggttaaaatgatgatttagattagttactatctcatccttgcatataaatgcaactagaaagtgacccgtagatagagaaaatgagaaagagattgaataaaaataaatgagctcatacacaaaatggggatacaaggcgatgcttgcatggtttttatagtgcaaagtgcaaaccaatgatttacttgtaattgatatattttaattctaacatttttcttgtactcgagaaatacttgaattaccttatgcataattatcatacaaaaaataaacagttaactaaattagtaaaagaaagttacaatcaatcaaagtagtaaaagttcaatcctttataacgcagaaaaaaaaaaaagtctcaacatagatgtttcttaatcaccatcctaagactagaaatcacatgcctctcacgagtcttctagttaaatgaagggaatcttgtgttctctaaattaaacaaaaaacaaaagttacatatatacatttttatattattagttattaattacttttataattaattttgtcaaatacttttaattcaataagtttatttataaattttcagctttaaactagattttaattttaaattagctaataagatggttttgccaaacataataactaacaaagttttcttttcgtacattttagtaattaaactctaactgtaacataatttatcaccaatattttacatatatttttgcagaagctacccatcattttattataatttcttaatgacattcggcttccggattttgcgatacgtaaccttctattaaaaaaatatgtatcgtttttgcacgtgtgattcttatgctgtacgttttttataccgtaatggctttttttattttttataattgagtcttacatcaagaggctggctacaaaatccacaggaatttgatgcagctctattagttttctattcgtagaattcaagtaatcatttatcgaagttgccaatacatatgcagatgtggaatttctaataggattattaccgacttaccgtcacgcatttttttttgtgagcatttatggtcatgcatttactgtattatctgttatattttcatttcattttttcttcttgtctctttagagcatgtttgattaacggttcaaaaattatttttgggtgctaagcttacttttgaagaataactcagtttcataatatgtttgattagtttcaaaaatatgattgcattaaaattttgcttagaaattaagttttgtaataacaagctaagacttgacttgagttgtttctgtaaacttaaatttaactcaaatttaatcttacaaattttaatcgaaatataacttacttattttttttctattgtatgcgtttgatacatttttctccattttttttttatctctcttctttcttctttctgtttatacactctattttttagatatatgtttgataatatttatattttttttatattggttatataatatttatatcctcattgatataaatataaaataatctctctatttgtaagtttggtacttctggtatcgatcgatttccattaatacaactgctttgatgattttataaaagaaaaatacgtttgatatttttcttttctaatatagtaatatacatctcttagacagtgaaccattgacacgccgcctaaggaaggctttatcatttgcatttgcaactagtaaactaccaaggaatacgaatatgatgctgttgccaaatctttgtagcagatttgtgcttcttaatgtcaacactgcgaaattctcttaattttttgttttttaatggagggatctttaaatttaaagaagaaaaaaagcatgctttgaatactgtagaggttactaatatatgtcttctcttctcttgtttttacttttttttctttttctttttaaagctcacttatttcattggaaaatgaaaatttcaaacaattcatctacttatagcaaaattagggataacagcaatcaaacgcgagtttgcttactttcagtcttgtccctcaaaaggcgggacaagttcgttttgagtttataaaagatgaggtgaaaaatgaaattcaatcctattcttccctagattttatcatgttcaaaaaaaattataaaaaatctatctcacattttttttaaattatttgttcatatactttaaataaattataaattaaattattaattacatttcaattcaatatatatatatatatatataatttaataaaaaataaataacataaacatatttaagttaaattatattttaattaaatgtataattttaaattttattataattagtattataattataatattatttatttaactattaaaataattattctatattttaataattataaaaataaaacatgaaataattatataattaacaattacatataatatataattatagaattatatataaatatgtaactacactattaataattataaaaatataagtaatattcctaatcccacttccttgggaaatccgaactctacctgggtcccaattaatatgggtttttcacgtaaaactcatggcggagtcgaatagatataggttggatttttattgacatacctaagcaaaatgcaactatttgaaaagatggatttattagttgttgaatacacaaagaaagagcgttcgtatattttctaattcatagcaatatgattgtagaacataactaatgtaatacaaactttgatttaagtttttgtaagaaaaaaacttttatttcagtgtattttcatacaagaaatatcactaacacgttatattatataatctgataaaaaaaatcatataatatttttaaaaactcaatattattatctgaaattttttaactaattaatgaaatgaagtgatgatgagtttaattaacttctaatttaataccaacatatgtgacttggaattggcggaatgaactcattcttcacaatgtgacaaactaaaatttaaatcctcgttaagagaaatgactacatttaatttttcatcatgtcttaagtataatgcttttgaaaaaggatattgtgagaaaaaagcttataatttaataacttttactcataaatttatgagttttaatttcagtaaataatttattaaaaagtatgattttacttttctttctatatttttatgctttttatttattatttaattcatcaaatactcgttgaaatttgtagagcctattttatatgtagtattgctgctgcttagttcaaaggaaataatgtctcgatttatttaacgagtaaagtagaagttattcatttcaggaaatgataaataaggagcaagcaggagctagagaaaacgaataaaaatgatatatttttgataagtttattatggttatagaaaacgaatatacttttttattttattttataaaaatgggctacatataagtaacaaatacttctatccaaaatgacaaaataaatgattgtgattctagacatgattagaaaatatgacatgattgattagtttgctatgtaaatttaaagaaaagtttttcacctattaaatggcgtagtttaattttaaaaaagtatataaaagatagaaacaatattattattaaaatatgatgaaattgtgcatttaagaaagtttttctttcttgtcatattttctattaaatctcacatgttttcaagatgaatacacttctcaaaattcaactgaaaatgaaaccatgaattacttgctaattaagaaaactgtcattaacctataatcttaaatcaacctatatatatatctatagaacgaccatccattataacttattcatcctaatatcgcggaccaaaaacaaaacttattcatcctatcacatgttagtttttagttttggggcttaaaaaacatagtatgctaacctgtttggtctattgggtcgggtcaatttgaccttgttgtttctgaacctcaaaataaaaagcccatcggcctaacccattgggccgggctaattttgaaagctcactttaggtggacagataagaatgtagttgcagagataagcatctaaatttgatagttaatcttaagcttgttggtttcagctcaagagatgatgcaaccaattttaaggaagccctcccaagtcctaacggtttcactgttgaagcaagtaaaacagaatatgccagaaataaatgagggaagcagctggaaaacaagtggattggcattttctccaaacagtgtcatctattgttcagtccactgcggaagttatgtacatcactgatatagtgaaactggagtgaaatgcatgtactgaccaacaattagttgtggcctgtgggatacgaatatacttggaacttggaagtaaaaagtagttggacataagggtcaaacaatgaactctgaatacgtgtgaatgaaggtattcaattgattggcgttgattcttcatcattgttgagttcataaaagaaaggatcctcaaggagatctgtggctgaaggtcttgcccttggctgtgctatgcacttctcaatgaattccttcacctcaggatctgtgactttgctcaaggcctcaggcttgattcccatcgtgacctttttgtatatctcggccacaccgtcacattcactgtagggtatttccattgttaccatttccagcaaacacattccaaaagagtatatgtccaccatctcagtgtaatcttcctcgtacagttcgggtgccatgtactctggtgtccctaagattgaatgtgctgcatggttacgtcccactattgcagccaatccaagatcaccaattttcacctacaaaatgccaaggtcaaaaatcaagggtctatttatttccattcacttttttggttttataaactgttttctaaaacaattccacattatttagtaatccacttctcatccaaattttgaaaattatttccaaattaccagaaagcagaaataattaagagatgtttttcaaactcttcttcaattctacactctctttttgccttgcatcaccctccatcaactatatgagtgaccttgtttaattccattttcgaaaactaaaaacaaattttggaaatagtaactaaatacaccttaagttttcaaaatgcaacctagcaatgcaaaacatagcttatgcataagcaaatttgtaatttgtagaagctctcttctcttagcttctccaacaactgatttttaggttatgcataactgcataagctaattcatcgtgtaacaaaactgcattttctttgaaccacctaatcattgcttaaaaagaagagaactgcatatatatgttggcatgactgtgttttcgtttcttcatcaatcatcaatagcatgagaaatactaattaataaaaacaaagcaattattaacctggccaatgttgccgttgacaaagatgttgctgcaattgaggtccctgtgaatgatgcaggggtcatgcgtatgaagatactccaatcccttaaggacctgtttggaccatttcttgaaggccttaatggagacgtggcggtgcttcttgcggtaatccctgaggttcccggaggtgcagacctcagtgatgaaattgatattgtggcgctcctcgtccttccacacgctgtaacagacgatgatgtacttgttgctgagggttctgagcaactcaacttcagagtgaaggcgattgatgagagcagtgtcttcgctgaagttcctcagccgaacctgattccacgccacctcgattccttcctcctgatcaaacgctctgtataccttcttcactgctccgcaaccaagaagatccctgtaacgcccgaacctccccgttggatcaacctccacgaacgcttccacttcgctatcgcaactgttcgacttctctgcaggcattttcaatctctctctctggtggtaaaaggagaaggaaggaagggaaaaggtggtgaattcgattacctcgctaacaactaacagcttaactaaactaactgaaaaggaatttatgaaactgaattaatatattactgattactcgttcaataattttctataaccctactttttcgctctgtgtcggttcattatcacatcaatgatcttaacttgtagtatttttttttgtccaatttctgatatgattgtgcatgaagcagcaagtacaatagtgaaaatctatgcgtaagaagaaaagcttattaccttaacaggtggcgaacggagattgggaatctgagacctcaaatatttgagaccctacgcggaagtgtagagaataaataagcaagggaagggaagggagattgagttgttgaatgagatggcaaatgttgaggtacacacacaatctccttttccgtttacttttttttagtttttaactttgtgttaaaaatcaatatatatatatatatatatatatacatgaattgaaataataattcttcattcattttcattcattttattcattcctctcttctttctttcatatattttcccttaacatgaggtttttatatatataagagcaattcaacaacatcctaataatacggaataataacaaactgatctaatcttaatttttatttgaatataataataaaaaaatgtaacaacctaacaaattataataataacttgaaatttaaataatacaattcaacactcccctcaagttggtgcatgaatatcggtcatgctcaacttgtcaattgcttcttcaaacactctttaaggaatgactttaatcagcaatagtttcaagaagtgcttcaagatagttcacaatgtgcttcggttatgtgaggtagaaagaaaattgagatacggaaagagattcggaacaataacatgttcatgtcaatagacttcagggatggtctgtgaaggattcagaacaatgcaacgagcttcacatcaatgaccttcaaatggaatacgtgcatggagaattgaaatacgagaaaggattcggaacaatcacatgatcatgtcaatagacttcagggttggtatgtgaatgattcaaaacaatgcaactgacttcacatcaatgaccttcaaatggatacaagaatgattcaaaatggaaccaaaatcgcaaaggttatgcaaggcaaaaatgaaattcatgataataataatcataatttgtaaaggaatcggaaaaggtgaaggttaaggaggagatagatggttggatataagtgaaatacattgaagataagataaaaagatagaaggagatgtacgtttgggattgtgaagaagaaagactctgaacaaataaggcatcggaaatatggtggatatcatgattctcattcatggaggaaaccatgattttttttcatggaggatatcataactctcattcatggagggaaccatggctctgataccatgttaaaaatcagatatgcatatattggaataataattcttcattcatttcattcatttctcccttctctctttcatatattttcgctcaacatgagatttttacatatataagagcaattcaacaacatcctaataatacggaataataagatctaattttaattcctatttaaatataataataaaaaaattgtaacaacctaacaaatcctaataataatttgaaatttaaattatacaattcaacactttgtagtaatacatttgagatccttgccatgacgcaaaattgtaatgtaatgggaatcattggatctggattctgaacttgtttgttacgttcacgggaagaatggcaaaacatttaagtttcaggcaaagcccgtacccatgctcaaccaccattaccaacagtctctcttactgtattatctgaaatctgaattttccaatattttcttcaacaaccccaccccttaatcatgatacttccaattaaataccattttccctatgcaaagtgtacaaaaactactggtgtaatcttcagcgattctgttttttcaattattcaaaagctggtttagttacgttattttcgttgtctcttcatgcatgagttatggcacgcggtacctgtacgttatggctctaataaaaggctatatttttgggggggcgggggggtgtcaattgacatgaaaattgcatcaatctgttcaacagctatatcaccttgatgacgacatgtctaattgtcaaatgctttaatctgaaacgtttagatccattgaaattcttctcctttttattatagtgcaacattgtagtcttgtgagtttatcagggcgtgcttgttaatacttttgaaagactacgcacccacaaacaacgtaaaaataaacaagcaactcagatgagttgatcaatagagcttatcttttcggcaacaataaccacaaacgagtaattgatttgtcaatggactacaccgtaggcctttcaacaacaccacctttttcatgatactttcaaataaactgctcgcaaataccattagtcctatgcgtactgtaactattggtgtagcctttagcaaaaattaaaaattggtgtgaatatgattattacgtcattatcgtttcattgttgattctgtggcatacccctgccggcgctgctattatatggctctaatatgatttatcagggatcaattgacaaagatgtacatcaacgtatttgacaagctacagcaacttgctgatgacgacatgtctaataggcaaatgcttcaattcgaaatatttagattcattgaaatcttgttctgtttctggtccatgttaccacaagtaatccccagtgaatgtcttgcgagtctctcatggtgtgtttaaagtttaatgcttttggaagactacaaccacaatcccgcaaactacatataaggataaatcaatggggactatcttttcagcaacaatgaccacgaccaagtaactgactggttcagtggaacacacctcaggcctctctcagaatcaatggctcccatgggtttctttaccaaacaaacttgtcccttcaccattgtaaaacacccctaatctaggacgtcttccccctactatggaaacacccttccctttgtactattaatcgtttattttatttggagcaagtaaatgcaattgaagaactgaaaagggatctgtacaatgtacatacatcacatgcaggctcaattcttgcacgactataacctttatctgataattactctaaaaggccataccataaaaataagcatcaaactgccattcactcagatgcatgtgagatttggctacatgaatggcaactgcaaaatgtatggtgaaaccagaaagaacctacttttttatgcaaaaaagaaacgtgaagaaactattcaataagaacaaaacctatcacatagacgcataaaaaatctctcaaataggcagaaaagtgagatagtaacttcgtagttaatccaatatacaacaatgcctttggcatagaggaattgactgaagaacttctagcaagaagattttgcacatagacaaccagtaatcgctgagcaaggctaaaactacaagaattaacaatctaagttgaggttacaaaattcagcaagcaaagtttattattattctcagattttttttctctccaaatttatatggcggtgcaactttaatacatcatcaagggggagggggagacatacagcatatcatggtttcaaaatatgttacaacatatcacaagggaggattggagccctctctaacagatggagacctggaagccaagctcccatcacgaccaaaccttgacacactcctactaacacttctaggagtagccaaagcaggagtagaaccacggtaacttgcccgaagtgtttcatcaacagaagatgaggacttggcaaacgcattcctcacaaacttctgagctgcaggagacagtgtacgcatgcttggactggcactcccccctctaaccggtgatgccaacgggggcttatgaaacatttttgacctctcccgtatcttgcgtgcagcctccctagaaagagaatgtgcctttgaatctcttgccggtgcagaaggaatcttataatgaggaccatcagcactaccaccaatatcaagtggcgtatcttccagatccaacctcagcggagtcccctcaatttctccccaagtaataaacggggattcatcaacacctggagcaggggacggtgtcttaacaaagctataaccattctcagctttcttcccagattctaaataaaacggatttggagtcttcctcaaatcatccaaatcatacttctttaacttatccccttctctaagagacataggcgccggcgtagtgccagcaactggcgcataaagcacctcaacagttccatcatcttttggcctagaatccatcattttaccatgaaacctagtgttcccgcgattgatctccttcgtggcggctttaattctattcgctctttcctcctcggtcaaagggacctcaccccgatcagcaggatgatacattaacaaattcttggcagtgtaattccacccttcaagggtactcggaggctgataagaggttccataaccatcagtaatcctatccctcttcacatcctcaataccctgcacatcctcattcaaatacccaaacctctctttcctcttcttattcactttctctagaatcttcgaaaaactatgattgtcctcactcgtgtacctcctcataaattgatcgaggccaagcgaagtatcagccccaccatcgttattctccccctctttagcctcgagaaccggggcacgggggctttgagagggttttccgtcgaactcatcgagaggtgtgaaatttctaacgaatgtggaaccgggtgtgtgggaggttgttctagaagtatcattgggattggttacctttgctgtgccggcgcggcgttcgaggatcttcaattgggcctcgcgaatgacaacagggtcgccggttttgatggcttcgagccagtcgaggcggtcgcggagcttggagatgtcggggaagtagtcgcgctcgatgatcttctccaacgcctcaacgtacgtgtcctcgtccagcaccgcagggtgcttcgcacacgatgatgatggtggatcgttagggttttgcgccgatacctgggaaattgaaggggacggcgacgagatgtggagcggcgagtgccctggagattgaagcattttctcagggtgaagagaaagattgattgattgaatttgtgtgatcaaaactcaaatctgtgagttagggttagggtttgatggggagaagattctctttcaggttcaacacgaaaacaaagcgagattggaacatggaacagattttctcccaaaccgtgttttttcgttttataaataagtatttatcttttttatcttcacaataaaagtaagtttttatataaaattttatttttttcctaaatacacgtttctttatataattaatattttaggtaattttttagttatttattttttaaaataaaataaagatagtgacgatctttaaccgtcatagtataaaattaattattttaaaagatttaatatcatttttgatctattatgtttcacagttattttactttgatatattaagttttaaaatttttattttggtcttttatgttttcgaaatatatcattatgttcatttttaaaatttaaaagttaacaaaatattaaggtttcgatgattttgttggtaaagttcaaagccgcagtatctatttcactcaggattgagtttctttattaggtgtttttttttttgcctgttatttcgggaggtattcaggtttggcatatgcatgcatgctctgaccaagatttttgggaatgattctgtactccaatttggtgaaggagctttacaatttgaaaacataaaaaattatgatgaaaattttaaaacttaatatatcaaaatgaaataattgtgaaacataataaattaaaagttacattaagaaaaaaaattaattgtgtaggtcaaataaaaaaaagagagtatatttttatatgatatgataagcccaatggtgaatgtagctcagagtgagaaaaaaaagggaggcccaaatccaaattgtgggttaatagagaaaaaataagaaccaccgaacgaagacttgacaaatgaaatgaaagcacagaaaggcatattttgtgtgtgtttgtgtcagcgtgtcactttaaaattaataataaactgaggagagagagaggacttttgttcccctttgccttgatttttgggtcaaataaatgaggatgttacattggactctctcccattgcttccttccacccaaacccacaacatagacgacatcttctgcaacacaaccaaaataccctcccttgttttgtttactcaactcgcacttcctcttcaccaattttgaggtctcaattccgggtaagtaatgcttcccacgtgctatctttctccttttatatattccattcaatttcgcctacttcaattcttccttcttcttcttcttttttttaaattctccccttattttaatcttcatatactaaaatctgtgtgggtctttttttctttctaaccgaggtatgaactgttgtgggggtttggggatgcttccacagaaggtggaatagcattttttttttgagacctaagcaatgaaatcctccccctctctctctttcctctggatttggttcggctaatttcagatacaaattaaagaataagctatctctgtaactgttgtgtttgtaattaattggattattcaactagtaattaagacgttaagtactgtatggtaaaagtgatctcaaagtaggagctggatattgatttttgtttgagatttgagctcctttctatctgaaaattaattaacatggctttatgcatgtgtctgtttgtatatagtattgcgttaagactccgatttggaatatgtatgtagatattctatttggtccatcatggctgaaatggtttcacatgtttaaagtgagttttatcttgcggcttctactaataaaagtttggtttttttaagatcagctgttgagcgactaaaagtagaaagagagtttttacaataactacttttttattccaatataaactttccacattttgttccttagaacagggttgacattaacaaaactgctaaaagttcaataaaggaaccacgtatgaaaagaaaattttctcgacccacactattcatattcatgatattgctgtcacagggcaccgaaatttgtgttttgctaattgctttttaaacgtgtcagctttgaacagccacaagcacgcattgcttgttcaaggttcaagccattcatggaagcagttaatgaaactagacctgtttccttctgatatattagaaaaaggttcacatggtttctacagacaaaagtgcggatcaaaatatcccttctgatcaattgcagcagagagtgagtcctgatagtgatacgacattgtcacaaggtcatgatactaaaaatgatctgtccaaaccagaggaagcaacaagtattctttctattgtagttaaaaatgaagggaaggattctgatgctactgcttgtgccttggaatcagatcaagaaggaagcacatgctctttaccacttgggaaacctttgcagagccctgatactctttcgcatgaattgcctcgatcgcagtccagtcaggaatgtccctctataatacgtgaaaaggtatcaaaagatggctataactggcgaaaatatggtcagaaacatgttaaggggaatgaatttataaggagctattacaagtgtacacatccaaactgccaggcaaaaaaacaattgcagcagtcaaataatggacatatcacggattccatttgtatcggtcagcataatcatcctagacctcaattaaacacagtatcaattgagtgtgttctgcctgttgttgaacaagcacttcacaaaccctctctagccaatgtggaaggtgagcagtacactttgtctgtacttttgtttctatgcctctgtaggaaagatcttaatgtattttttgacatcatacatgaagacaaagcatccgttgagcatggatgtatgcctcaacagatcaagcctttacaatcctttcctcctgcaacagtttccccagttaatgagttgaaagctgcacatttacaattgactaaggcaaagaatctggttcatgataacaaggaacctgagtcaaagcggctgtacgttatatcactattttttaaaatttgtgttgatatatatatgcgatagctaacctttactgccaaattgataccaagcaggaagaaagacaatagtaatgctgatgtcactagagttgacatgtcaactcgggaatctcgtgttgttgttgttcagacttcaagtgaggttgatctggtaaatgacgggtatcgctggcgcaaatatgggcagaagctagttaaagggaatacaaacccaaggtacatgttaacttttcatttcaaaatgcagtcctattttctgctggtgttgtgtgtgttagaatgtgtttatattgatccatattatatcattctgccttggaagagctagcctgaagccctgtgagttgtgactataaattaatttcattagcttccagtctaaagatctgtttgagttattcttcgccttcttgaaaccaacaggaagtgattatagtatttccttttatatcattttcaaagtgtgtcccacatgcacgttttgtaggattataatctgtggctaatacttaagtccgcacaactaggtcacactttttatgggtttaacaatgatttagcagttctaaccaggtattgaaatgcaacccaaactcacaaatgtttgaacatagatgaacaattttattagaagtattgtgtttctttagcattttaaaaaagcaaggcaattgtatcaataatgcttttgttctgaactggtatattcactatattgggtatctgccaatgaccgattcctctggtctaacttcaacttcttcatctgctggttacatttgtcaagttgcctcttctcccactggttacactttttttagatgtttatttgctctctcagcccctctatgctgtgcttacatggatacagtgttcacaaatgttttaaattaatttgactgcattttctctccactcttccagaagttattatcgatgctcgaatcctggatgccctgtcaaaaagcatgtggaaagggcctctcatgattcaaaaactgtaataactacctatgagggacagcatgatcatgaaattccccctggacggactgtcactcagaatgcagctacaaatactcgcacaacggccactaatggcaagccaggaaccaaatctgagggtaatactgatgatacaggggacctaattggcgagtcgactactaagtcaaaggctggtgatatggttgagtttcgtgtgatcagcctttctaatgagggtcctgaaattaaattaagtgagcaacaacaaaaggataactcagctactaaagacgattctgtcagcaatgacgttatatgccattcaagttctggagttctgtgtagatcaaatgaacagctgaaaggtgaggtaaaacctatatcagaaggaagtaaggattgccttaaggtggttgccgttcatgatactcctagtacagaaagtgaatttaacaagcaatccgcagctgatgaagaaccggtccaaagctaaatttgcaatatttttgaaagggtcacctagttacagaagagtataaatatttgacaatgacataggctttacagatatactgtgggattataattcctatttcgactctaaccttcaactcttcttctagctctctgcttgtctttgggcaggttgactaaatatgcaaattacaattaatactacattggaggatatcataacttgtataccattattatttgagttaaataagatttacattttcgtacacatgtatctaatattctaatgtattgttgaacatactcagctatttgcatgtaattcttgttttgtgcctactaatgctttaatcttcctttcttccatgtaaatttacaaaatgcgttgcagaattgcagtaattgagtatagcaaaagttattccatatgttaaaatgtgtgattgttggtgcagtggtttagattcattctttaatgtaatgatcgatgctcgactaaatataacaggatattggattggtaatttattatttatccaagggtaaaataataaaaaaaaaaaaatctgggggttggagcctggaggtggttcatttagatagccactcctctcatactttgtccaagcaaacaggataaccaattggcgtcaaggttggaggctgagaattttatgggtccatatccattacgtttatgctcattcttggtgcagtctatgcttttgggagatagtgcgagggtctcttcttagacattatttgtttttggagttttacctctttttatattgaattaaaaataatagaaagacttgtaaaccagagaagaccttcctgaaaaatcgtctatatttttttgtgtcacgagttgggtactaaaaccataaggatagcttagaatctcttttctgttttacgcaattatcttattaggcactgctattattttgtcaaagtccacctttttaagtcacgttggaccatgtcaaattgcaagaaattctttcttccttccctcaccaatagacatgcaaatgttgaggtccaccgatgatgcaagtcacatcctaatttcaatggtataccactttcctgttagaagaaatttttttatggagaaggacacaagaattttccttaggagatataaggttgactcgatggttaaagaagggaagaggaagaggtggggggttcgaagacgccaactgcatttctaacaaaatcaataaattaatatttttcaataaaaaaaaaaaaaatgttctgtcaggttggtccaccagagcaacgaaacgatcccattgccacaaaccctcgagtacgcagacccagaatggaaggagtgattgtgccaagttaattctagtcccattgcctactcctcccccacagaataacgataaatttcaaagaatctgatacagctgtgtttcttttctttcagtaaattactagtaacttatctttcttaaatgaggccacgtgggttattttattaatttaatcttaacacttaaaagtaaaatatctatctatttcatctaataaagtgaatggacagcaatgttggaaccattgctaagaaaagccactctactaatattctaggaaatcactttccccagccactaataagccaaacattgagggaccagaaaagattttgaaatgaaagattaatattgctgataaagaaaaatgctacatacaatttcaattgaaattcttgaaacacagaaaatggacaattagattggatttaatgttgagacctttctcattaacttctacatagtaatggaacagaaaaagaagagggacatgttatgcttttgttccccctcgaacattgaggagtcacatattgcccagttctcatttccaagcgcaagaagcaaccaaatctctattcatccaacccagataaagagctccatctctctcttcaagtctatatctataactgtagttctcaagcaatttctttatggtaccattcaccaatgaactcaaagggtaaggagtgaaaccggccattgcaaatcttgacctccacttgccaagcacctcatgtcgttccaccctctcaaccccttcacaagctatgatgttaaccaagtctcttgccaaacaatgctgctcaacattgattctctctttatgctctctgggaagagtcacatctattgactcaaacattgctgtgtaatagttcagagtttcaaggaaacgcggaaagaatgcagcagtgttcgtgttagattcttgctcaacaagtgtcaccacctttggtgataggctcctaaccaacctcaacagcctatccctgtgattctgagtactcacactttcatccggcatgtaatgtaacatgaatgcaaaatttacagccagagcttcccctggtcgaactccaaggttatgtagttgaacatcacaacctgagatagctgcagcatgaaattcaaatggcaccttaaaatgctcagcaagctttgataacctccgtcccactatgtgtagtccaccgccgcgagcataagccgatgttgaatcatcaatacctgtaatccggatgtggggtggccctccaggtctagctgcaaaagcctgaattaaagttatccactggcttccttgaccaatttggaaatcaattatgtgaactctgtcttcatctttcatggcttctgcaatggctccatttgcagacatatacccaaacttgaagtaggggcaaacctcatacagtatgtgcatgtaggagagaagttcagcactttctggttctttgcatcttaaagatttgtatattgaactcccagaggcggccaatcgggcaacaagtccttccaacatgtatactcccaaccgttgaaccggatcaccagaaactgacaccacctgccttaattcatccatcagccattgtgccattagcaaatcattgtctgaaatggatttggcacatgcaataaggatgagctttaggtttttgctagaaattgccaccattgtttgtctccaactgtccatctcaagtggaacgaagttgtttccattgttgatggcactgtcataactatcaagattatcagagtcagggccaagcattacactttccaactctctgagcttgtgcttgaagttgaagctgcttaaatcatcagttatgcaggagccactcataggagagccataggtattctcaggggaatgatactggtcaggtggatatgactgagagtcttgctgcgatatggggctgccgttgggtgagaaactaacagttgaaggggagttgtaaagagctacagaagatgactccaaagtgcagtaaagttctgaagaacttggagttgaaaagtgagtaccatggcctccatcatggtagtatagctgttgatttcgagtctgatactgcggcaagcagtatgcttcaatttgttgtaatggttgatagtacatacttgaacttctatgttgctctgatgcctgcattatagaattgacttggtctcaactgtgttatagtagttcaagtgatctcttccagcagattatatgaagaagcagaacaatggacaatagtggcctagagaaagctgctaattgatactcatggcaacaaagatatagtcctgagttgtcaaggttctctcttctgggaggttataaaccacatatttgacataatctgctgtctgcgtggaaaaatcacaacgtcatcagtgttatcatatcatcaactttcaacttgcttccaatgaattgaagagatagaaagcaatagctgaaatattcagttgacaggaaccagaatataaggacaacttttttgtcttattaaagaaattaggcactcttcagggtcagcgcactgttaaaattagtttacttttttcttctccttctaccgtgtattatcaacaacttgactctcataccaagtcaaacaattcatctctctgcctattttcttttttatgacaaaaaatgaagaactgatggaatcaattagaagaatttccaagaaacttcataaacgaccaattctaaagattattgatttttctccaccaaaaaagaaagaaaaatacttcggaattgaacaaagagaagggaatagatattcagaaagggaaagggaattatctaaatatgaacatctaatttccattaaaaaattcaaaagatgagacaagcagaactatacatggccccacatattgtattgaattagttttcatttgaatgaagttaatcattctaaaaaactgcagaattaacatttgcatacggaaaaaggctcaaccaaatctaatgaaaaatataatttttataaatcacagttaagaaaatttccaattctactagattaactaaattcacttggctgagctgaaaagaagaaagcttgaatgtcagacagaacagattcacaaaccacaaaagcagtaacagcaattggagaagtgcttttattttttttctttctgagtttgatgaagttacagatgttgttagctgacaacaactagttaagacaaggttaatcaaaccaccccttatacagtactcacacacacatatatatatatgtgtgtgtgtgtgtgtatcaaaacaaaatttgtgcaacaagcagataggttcacagaaaaatgcacatcaaatcaaagctcacatctcattgcagaagttggttaagaaacaattaaagagtacaaaggaaagtttgacatttatgcaaaaaccattcacatcataagcagaaatgctaaaacactagaactcaaaaagttcatgggcaagaagtattaacagaatatgttttacttcaccaaaccgtttggagaaacccttgtaaatcaatgaagatcaaaactgaagcaaattttcaaggaaaatatgaagccatgaatgaaatggcttcagtttgagaagtttttgaacataaaaccagtttcttaccaagtttcgaggaaattctgaggttggaaaaccacagaggattagaatctcagagcttgggggagtgtagaagacaaggctattccaatggagaaaaaactaaggcatatgcatataaaataatgaaggagaaattgcccttccattattatagaaactacacagaaaccattggctggtgttattaatgttaatatgatgatgctcggtgacaactcttttttattgaaatgacaggaataccccttgttaatagtatgcttggtcaaatactgccatcaatgccactcttacaaatgtgcctcacaatcacacgtggcccgttttgagtgagttagcatgagcagcttcacttcaatttccttttcagtccatctacttatctattcattttctcttggacctttaatacctatctttttcaaaagaaaatatgtagaaaaaacaaatacttgtatgtttaattttttcttcttcttgtgcacaattgagtagtatcatacatccaaatttaactacctactgctacaaaaaccgtagttcagtacttcatttcatgaccacaccacctcctatatggtttgcattaatgacttaccaactttgatgccaatttggtgactaaagacataaccattcaacatttcaacatacagaagcataattgtatctgcatacatgaattgttttttgtccgaaatgcaacgctgcttctacttcaatgatcagtaaattttatcatttaactcaaatcaaattaatatcaaatgccgtattaaactgttcataatcattaaacgtttatcatttaatgaaaccaaattaaatccttttcactacttagacaactgattaacaagttattcattacttatatgttcactcaaacatttctctcgttttttaaaattattatttatatatttgtcttatttcacatcgtgaaaatcattgctgaatacggtattgaatactgctagtgaagtttaatttaatttgtcaaccaatgataaaaaataaaaaaaaaaaaacctcggccaacaaacttaagttatttgaagtaacaacccccaaataataagaattaattatatagattattgtttaattattatagacaaatattagtaatatacaattaataatgataaatgataatgactatccagggtggtttagctggaccgatatctcttgcacgacatgtatgagcaacgacatcagtgaaatgacatgctcatctcatcttatcggtcgattgtagttaactattattattagctacaaaaaatggtactttgtgttataatagcttctgttatagttttgaaaaacgagtgtatttttctttctgttggtcatagatggacaatacacgactaggaaaatccattgtcatttgaccccaaaccattgatacattaaatagaaattcgagtgtcactgctcaatataccatttattctaccactagcaaaatccaaacttatctctgatttgagaaaatttaagagtaattgtttagatgaaatacagtggtgcagtaagttgtttgaaaatcaaagccaggagtgatatttttccttaattctttcaaattgaagctgagaaatagtttgacatgaaactggtgatagatcctcacgaattaaataacagaaactaagatttaaaggatatttatctttgccatagtttgctcaaagaaagggagactcaacagtttgcaagtgcaattcaggggattgcagtagcatgaaataaaaatttcccatttcagttatttggaggatggcattattagcacatcaaaagcaagaaaataagaactagagatgaatgaaatctgaagtcttgagagaggattcacatttcacactggaaaaagatatcgagcaatatggtatttggtcttgtgaaaatgaaatgtgtatatcttagttgttctctaattttcaaacaaacggtcaaattttgggagtgattgttacaagtattttaatgagaataataataataataataagccgaaccaatataggttggtgtggtgtccacacttttaatctcaggaaaaccatcatccgtgaccatctatgcaagagaaactgatataaactgcactaacttcgaagggatcaaaggtatatagacctaggttatacggaaagaacatatgtaaccgagtgtgacacaggaaaccccacttcgttgtagattatgttatatatagtaattaaatgtttcctactttttgcttacctcacacacaacaaacggtctaaaaatcatcaatttaactcctctaaagtgaaaaactatataaagtgaaaacaagaatttatctactctggattaaaattaaaataccatgtaatcataacgtatttttaattaaaaattcgacagtaaatgcgctcctactttatcactttagacacttttttcactttagaagtgccaaataatcagaacctgacttatacaaaggtacctgtctgcaattaaatcttgagaagtgacaaatctattgcattcataagtagtaattatgttggatcttgtgcatgcatgtatgcattaatctggttagattcactttttatttcaggtgcttctatattttatcttagcttgtgccaactaaattagaaaactaagataaagagggtgtcagcaaattaaggtcgttttcgtaatttaacgaccatattatctttttattttcaaattatatcgatcaatagtatacataagtcatcagtgaattgttgagattaaaaaggtagaatttagatgatgacccacaccacacggttgagttagaacttagaagagagagaaccgtacaataaaggcagtggcaccaatgatgtaagtagtgccttacacttcagctaacatgcacttgatctccatttctatcaaatttagtaattgcaatttatttattttttaaaatctgtacatttatttatatatgtattttgcttgttgcacttattctctttcataatccattgaacttatctcagaaatatccaattagaatctctaaagctttaaaataatcactacttcttatcctaatccaatttgaagttataatgatgcagcctatggaaagttactgctaactcaaattattgaagagtgcacattcctggaggatatctttcataattgcgtcttcaacttattaaaagcgaaaaggattgggcgataactgcattaaggtaggtaaagtgaattttcataatcggtgataattaggctttagccatattttaaattgttttttataatgccaaattcagattttcctgtggtttgtacaaatttaattataagaagcatctttacaatagattttttaatacaacatgaatgcttttttcattttatattcatgtacccaatgcacactagtacgaatataaataatttgactattaataatagggcttaggacaacatgtatcaactttttggaagattgttaataaacaatctgcataactgactttgaatccacgttgtttcaaatcccaaatttaaaataaactgactattttagaagaaaataaagataaaagacaaagcaaagatccactcacgactgtttatattcctatcttggccgtgctactattatttattaaggtccaccatacatacatacacatatatatataaatatatatcactttatacgcgtgctcttatgatattgttagatcatgttcttaatgaaatgctgaaagaccaacggaaaaaaaatgcctaattctttctctagaaaccgtaaatgaataaaatcatgaaggatttttgttttttctttgttatagtcagatattacgtgaaaccaagtgtcaaattattatgcgtccattgatcttacaaattataaagctcccctgccaaaacatgaaatagtctattgatgtaatttagcaagtagttttaccctttaaatatgctttggggaatcaaatgtaccaaagaactaaaccaaaaaaagaagaaagaaaagggaatcttggtaatactttgtccagtccaaagtgagtgaacatcatggcccacacccttacctgcaattaaacctttatttgtcaattgctctaatttggagttttgtgtttattctggtgtgcgccagcgattttgtcgaagatctacatagagagcaaaatgttatttatttgacatatggtggagcatatgtacttaatttagcttctaggtcaagcgaagatgatctctaatctctctcaaataattttttatttgcttttatggtttgcatctgagttccagttggacaagaaaaatgacacgagatgaaatgaaagtgacataagccatttcgccatcatcgattgtttggactctaatttgattccccacatttagatcttgatatcatgtcactgattgatgtaaaataattcttctgtcttagatgaattggccgaaggatttgaatatcaattgagttttttttcttctttttttttttttttggtgtatatagaatatcaattgagttgaaaattgctttataaaaaattgagttgaaacttaaaagataaagcatgattaaatttcagataaatcttgaaaaccaatcaagttttaatgaaatgtaaaaaaatttaaaggtgggtaaaaatttattttgacaaatttaagggaattctagaatttggccaaaaaaaaaatggggcaaataccaaaccgtttttattttttgttgctttttgttttgtttttcttttacgattagcttaagtgaatatagggttgaatgagacttcatataaaaggcataaatccgagtattaagaaatgaaaagaaaaaaaaatgaaaggatgaaaaggaaaaagaaaagaaaaaaaaacttagttatcattttataaaaaatgccatcacgtaattcttgctgaatttttggattggccttttgaagttaggatggagttttggatgttctttgctttacgcctggacttagggccatcaatcaactttctgaagttggtctgttgtttcaaatgtttcggccttcaagtctaagtttcttacccttatttgataataaatttgaaagaacaccatatataatagtttgtttcaatatttatgtggtggaactcagagtttaaaaaaaaggtttgcttgttattgtaatacctttgttgttttcttaatatttataatagtttaatttgatttcagcactgataattttttttcaacaataacgactcaattttgttagttacaatactatggttaaaaaaagagcaaaagtaaaacagtacatctatccttgttatccttctttaatgtacttcattcataaagtagtataaatctaatcaaaatattaaagtcgtctaacaatggcatgttttaacttcaacgaattgaaactccctttcaggtccataaaaacagagtaatttcccctctctacacatttcaccatggttgactgcattttcattgttgaagagttaaaattatttgataataagagataaagtcttgggaatttagtatgatataataagattagaaccaacataattaattccaaatgttaattttaataagtcaatgactcataccaaactagtataatttaccattactcttcacttttttgtccaatgtaatattagtttcttctatattacttcgcatctcagacgtggacaaaacaaaacttgacaactaccacatgactagatggtatttatttgtcatgtccgaacgttaggagatgagttctatgattctatctcaacaactatttccacaggctcacttcatgtgtagccatcgttatgagatctgtttttcttctcccacgactttcacattgttgtctctgtacaatatctggaagaataagaagatacgtttgagcttgcaaaaataagacccaaaacctaagcttactggtgaatgtctcatcccctacattcattgttcaattcttctatttacataaaattttaaaacttctttattttagtacattatcatgcacaaacatttacctataaatcattaatcttatcatatggtaaaaaaaaaaaaaaaaaaaactttaccacttagtgttaaaaatgagttgaaatgaatggaactaagtttagctcgtctctttttaataaaaattaatttggtttaaaatttaatttgagttcaatatatcaaaatgatgagcagttggagacaagaaattggtagatatctcaatcaaaagggcaaaatgcttgcatctggccatggcaatagaatagcactttaggctagaagaccctataacttgcgtgccttacataggggaatgtagggctgcgtttgtcccccactcccaaagcactaaaatgaacttgaactcttagaatgaacttgcaatactgttgcatatgcacgattttctacttatttagtatatttatttatcataattgaatttatttgttttcagctagatgtgaaagtaaggaagatgcgttggtcgaatagtagcccttaacattgaaggcgttggttaaggcaggagcagaaatacttgtgtgtccatattatacaatatgcatacaagaaacggttcacacacgttctactacaacctacaggatagcgaatgagagtattcgagctttctttgagaattatgttgtacaaaacttatatataattctataaatactgtttgtattatttgctaattagaattagagttccaccttactaatttgtgttaaaaaagtttgtattaaaaaattatgtaaattattgagataaaacttcaattctaataaaaaaacagtgcaaacaacactgaagcaaagtttttttttcttccatatatattctacacactctaaccaataatgagtgaaatctctctgctaattaatgtccttttagtgcgagtcatgcctaagttaaaagacaatcagacctaatgataaagtggagttcattttattaggcatgtgacatattagaaattaaataatcccttttcttaagtccataaaaattctccacgtagcagttttcaataattgatcaattcaattcattcatataaatgggaggtttagagtaaatttcagttttgactttttttaaaaaaaaattagaatatttcaattaaaaattaaagattaatctcttgatgtattaaaatttatttaagagattgattttaatgtataaacaaatgttgttttataaacatacatatctagagatcaactcctaactatatatttaagagacataattatctatcaattatatcacatcatatttttttttaactaattcatttcccagttatgcttaactaaacaaaaataatatatgatatgcaagtttgaagctagtttaaaacctaacagtaacagtaaaactttgaagatcaaactttaatgattaaccaaactgcataagcttatcaaaatcaagaggggctctagacattcaagttgttgtcagaaaatcttgatcaaatagcaaaaggttgtccctcgaccttggcatgccgattgtagtactttaggatgcagagtcttgtaaattgcatacttaaaagacaaaatgtaggccttgctgataaatatttgtcccccgtttccaaattcctaaaatgaagctgaactcatatagagtgaccaatgtttaatacacacactcacggtagctgctatgtggggctaggcttaaactcggtccaattacatttctgaaattttaccaagtttcaggagtgtgtttcaaaaccaaaaagccataatgagagcgcttgacttttgtattcagttttgctgtcatggcaccgcccatgtaaggccttttgggagatacattaccttaatgttctgtcctttttcatctgcagaatttgtcctattcttatccaatcaattaccaaagttgcagattttgtaaattttaaagggtttacattgttcatcaacatgttctgccatgcattttggccaacatatgggtccctcttaccacatgtgcccatctttaatttggaacatattctttactcggacatttttatttgttcctgacgcggcaaattccaattgggatgtgtgtagtggaggagtttgcatgtgtgtatgttccaaatctgattttgggttagccttttcctttctcaatttcaaaatcatccaaatccatcactccaaataaatatttttaaatttacaagttgcttaatgctaaggcatgcgagggtgtgtgcacgagttatacatatatcaaatatcaaattgtctatttttttatattgattatccatcttctctcttttgtgtagcagtaaagaataaagacactagctcctacgaaaagcatattagccgaaaagcaaatgacacgtttaaaccctatttcagagggaccaggtaagcaagtacttgatacttaattataatttacgttagccaacctatattttctctaaactttttggctaccttcttgacacgttctttgttgataataagtcatttttctagaattgaagtttcattaccaattaccatatataaatcgtcaaacagcaagtcagagtcagttatttgatgagggcattccaacacactagactaaaagaatttgtttgacaaggtctctttctttcctttaaagttctaaatatttgggaatttcaagttgaaatattggactggacgaaatgaattgcgcacttgtcaagcatagtaccaaattttaactggcaaaccaaaccattttttgggtcaatatcatcaccttatattccctactcaattttcaaggatcgaatacgtttgatcaacagaaatactaataagtttacaatgtgaagaattagttttgaataaggaaatttataattttacaaagaatagtgtgttttgactcctgactcgaatcgaataactccataattaagacatgcttttggtaagattcctgggctaggattactcctcaattaatgtatacttttggttttggttttggttttgtaatttgtctgatgtcttaatcagaatgttggctttatttaatttattcaaatgcagagtcaaccaaggactttgactttcgaggaaccatcctgttaattctaattccaaattctaaacagagaccgtagaaagctttgcccctcaaattatattctggttgactcttattgcagggcttctcagtttggttccttgagtattgaagaaaccatgaaaattccagaaatataagagaaaaaatattacaaaggaataatagtgttatatatatatatatatatatatatatatatatgcttttcctatttttgaggcaacaaagggattaagttctttgagtaataaaggatgaaaaacctaacttacatggcatggcatgatgattctaagagagaaaaataaaatttagttaaggactagtttggtatgataattacaatgaagaactaaataattattccgagtggccacgtaattttgattatatgtttagtaatagtattattggcatgaacgactatttgcaaagagtaagtaatacgaatcaatatcaaccaataaagataagtagagagcgaaaaaattatgttgtaaataaattacataagagacattttatgttctatgcatgtgttgttcggaaacagttttgtatttaactagttaggtgacccttgtcatgcatgaattaattttgtttaatatttattttacaataacaattaaatatgtaatatgatacatcattaaatgaaatttaaatatgaacacagtcacaatattatattttataaaaaaaactagaaaaacacaaattgtgtatatacatacttgcctcaaacaacataccaaatttttttattttccaaccattgttattaccaaatccatcaaaaaatacccccaaaatacataaaatattaaatacatatttttctcactttatactcacacataccgcaaccaatatcttcgcatgcacttgtaggatgttttagaattataagttcattgcatccaaagctctccaattcttaatgtaactcaattttgtgaactacatttgttgtttgttactaaaactggctcatgaaacctgcatcactactcattgcatctcgtaaaacttaaaaatatatcgaaaaataaaaaattaaccttgaactttgattaaagggaatatcaggaaaaaacataatcaagcattttgatgttggggtcaaagggaacatcagaatttagatggcttgaatttaaaaatccattttggccttcaaaatcgcataattgaataacttgagtagcttttgataatgcaatttgatagaagccgagaggcaaaaactacaaataaattaaaagataatatgaagattaataaaacaaaggaggtagaataaaaaattcaagaaacgatacataaatgaagaaaagatgtgttgcctgacttcaatttgatatgcttaaatgcctgaatctcaaattcaaattgtcacaaaaaataatgacttagtgaaatatagaacattttaaatgataaaataacttaaaaaaagaactgaaaaatgtagaagtatcttttgtttctcatattccaacatgctccctcttattgcttgtggtttgtacctcgtcttattaaccctaatgtcgaagcatgccctacaatgttggattgagatgcagttggcgatgtgacaatcttgtggaagccaatgtagttagcttatttgaaagaggcaaaaaaatgctacagagaatttaattgaagaaaggaaagggatgaagaaaaaatggctagtacctccatggggtgtaggtgaagaaaactcactagagcataacacaaagatagaaagaaatgaaatgagttgataattaagggtgttgggaagaaaacaaagcatcaaatggaaaaaggaaggtataatgtgaaaaaaaaaattcattgaatgcataatgaaaattgaagaatcaattaagaggttgaagaaaattgaattgatgaaataaggtgagacgaaaaaaataataacattaaagaagttgaatgattatgagtactcatttagctaaatgtgttggcattaatgagcatgaataacaaagagtttttttgtaagttagaaaaagaagttaaagagtccaaaacaatcattcaaagtagtttaataagaataggcaattatgatgaaaaattaggaatcataaataattaaatgttagtagagaaatatggaaagacaaaaaagtacgagagaaaaggaggtgaagattttggagaaaaaaatttgttgaagaaataagaactattacatatataataaattctaaatctaataatcactcttagtgtatatttgttttgaggggaaattttttatttgagtaaatagttttgttgatatcagctctaaatgtactttattaattacaatgtaaaatgatttttacatttctaatataataaatgtttttcaataaaaacttttcaaatttattttcttagcatcaattttaaaggttaatgtttacaaaatcattattttaacttcaatatacttaaggtatttttttactaaatatttctactgatgcagttaaaagattaagggtgtgtttgaaaacccatttgatccacgttacggaagttttgcactttccacggcataaacacagaagcaatttagcaaggtctgtgttgaattagcgttgaccgggtttagttgaacccaaatgatatttaaacactcactaaccctcgaactcaaaatagtagttaagtaaaggcattttcaaaaataaattcagctaaaactaacccatttttcgttacaaccaaactctgttaagtatattaaaagaattgtcaacaaagcatgatttcctttttgatcaggttaacaaacctttccaaataagtactttttaaagcttaactccactgatcaaagttctccaaaatccaaaggaataaataatacttgtaagcccatttacctattcatgggctgtacttctgcatattgaggcccatttaccttttttttatttttatttttatgattcttaaagagtaaaatttatggagtaaaaaaacaaactaaaaagagttaaatttgtaatccatccatttttatacgtaaatttagattagacttactatttaaagacataaatgtttctgaaaatataacagatttaggtaaaaatttcttctctaaaaaacaggtaaacatttctcaattaaaatgagaatgacactcactttatagaacagcaaagaattctttctattcacttcctcttggatataaatgctttgctcatgaactacggttaatactgataaacaaattaaggttaatgattttaattattaatcaactaaaaaacaattttcaaatataaacaattttagattattatgacaagttttctattgtaatgatttgaatgtgagggacagagtaatatatgaaaacaaggacaggttgtgcttaagatagaacaacttcgtgccaacggtaccaatacactctttgatccacgctttagtaatatattaaagttaattgtttcaaatgtgagggccagagtttagatcattacaatagaaaaatgaatcttcttttctgttctgttccttaaaaacagatgttcagtaacaatgccaaatatttgatgtatgatcaaactctctctctctctgaagatgcttatgaagatcaaaaaactctagaaagacgatcacagtacccaaaccacaattggacgtggggtgtgtgcactgtgagaatgaaaaagagagagctagaatgtgtgtatcttgcacctttggtgatacttctatttattctcactgacctgtgcaaaataagggaaattcttgcaattcttgatcataatctttaaaagatgaaccatatattatcaatattcttcatacaaatattatccatgatcttctcttgattcggataattatttaggaggtaattatcccttgaagtttgtcataaatctcgttgtgctgaccgtactgggcttcttggtatttggcccaatattactcaaccttaacacactctttaacaatatattaaagtgtcactgtttcaaatctgaggagccattctttagaccatcacattagaaaaaggaaacttcttttctgtctcactctttaacaatatataaaagtgatttgtttcaaatgtgagggccatagtttagaccattacattagaaaaatgaacatttttctctctcttctaccctagtttttgttttcccactgattaaactttcaattctagaatccaactctcgataactaactcgatccttctaccttgattcacaaattgtcatatttcaatcgtattccttttgaattattagaaggtccatcaccacggtctaattgtcaagtttgaatttgaggagatctcctacaattcatgaatgaaatggtccaaggcccagcttggttggaagagttcatcaaacttacatttaatcacaatttatatacaaaatagtctttcgaggatgtttgatgcctctgctcattagtcattcctccataactctgccccgaacctatgtttacacttaaaaacaaactggtctgcaaaaagacctaattttcaaaggttgaaccagctaaattcataacttctaatatccaccgtctataacaggtcaaatatttttcatcttgactgctcgttaaataattaatattccaccaatcacaacaaaagtggtccatcatgaatcactttatattagtccttgttaagtgcagctagagataatttatactaaaaatcagtatcattgaatagtaacaagagtgacgtgatcaaactcgtcatcacttaatgtgtaatgatactatgttaagaatcaataatcctaaaaaattagagattttgtactttgggtgcataacatgggtagaagaatcatatcctttttcaagttaaattttctgaatataattcacaattttattagaattttttttagtagtgatgcccaccaagggatcgtatagaggggcaagcaatgttggtccaagatgaatgcatgccttcttaagtcaagcagcctcccgggtttggtccggaacaagtatacctgcatgtttggatgcacgtttaaaacaacttgattcacgtcttttgctctatttgacgtggaaatcctcttatacaaacacataataccttgttaaaaactgagttcaattgagctacacgtacattaatgtaggaaaaacttaatttagttttgtaagataacaagttagtttgctagacaagattttattatgactttccagcctttgacctagatcaagtgaattgtaagatttcagcactatcaataatacaagaaaaaggccccaaaaaaattgcttgattgggagtttgggacacataaacacacaaaggcacgagctctagtttttgctgcagttattttaagtcttcattcacggttgtcatcagggaatgaagtcatagtgacaagaaccatgacctgggcacaaacattaagcaaaaaggttataaatcaccattattcatacacttttctgtggtgcaaaacttaaataattttaaatcgggattgttccaatccctgacaactgaaaagggactcgtgtgtggaaccattttcatagaccatttattgtgcagaacggagtggcgtaaaagcagatggaaggaaaaaagtgtaaaagaataatttcttcaggttataatatgagatgagaaacactatttatgagattataaagtataattgttcatcagttgattgatctaaaatttgtttagtgagaatgagaacattactcgtgccaattcagttcaaatttttctgtttcacgcacgcttaccgaagtagtttgaatgtagtttaaagattttggatttatttgtaaaatctatacttgacagattaaccttcaagcatgaggttcatttaaattgcactaattgactctgtcatgtgaacatgcattatgtcctagttaaaccaaagtaggaaataagtgagtggttatcaggaatctatttaatacttactaggatccacttctgttgttatggcagcacctctgaagtggcaagaacctccactgtgcttgaacttctgatagtagctgttgaaggcataagaagcatggtctttcaatgtgtttggtaaatagcatggttggtttacttgaattttgctacaatctgcaccccctttcccacaagcccaatccaaggctgcctgcaactcagactccgtggtctgctcatcagctacacaccattgctcaaactccgcatacgctgcatgatatgtagtttttaagatgaacactttgttgaggatgaatatatatgtacaacatctaatctatcatgtaatcaattttaacttgaatgatgtattgctctttattctcattattataatctcataacaagtccaattttaatccagaatcttattagattaactatttaatcaaacggtaaatatgataatgaaatcaaaaaggtttttttcctcaatggggatattttttttatttatttactaaatagggtagcatttaaaaaaattaccatttggggttctttttattttcacgactcttttttatttaaaataaaaattggtcgctaaaaattgcgataaaatattgtagtcgcataaaacaacattctatcgcaaaaagtattagcgactgaaatagcgactaaatttttagtgactaatttttaaccatatgacacgacttaccctcaaatggtaatttttttaaatactgcccccatttgataaatgaaaaaaaaaaaaaataccccctaatggtgaaaaggccaattaaaaacaatagagggagaaaagaagtaactaggaacatttcaatgttttcatttatggagtagaggaagcacatttcgattacctgttttcggaggaatcatgaacaggaaaagtagaggaagcaccaacttcagcatgaatgttgccatttttggagaaaaagataagagaggctttgctgattgataaagactaaagagtttataaaatagataccaaagatataagcaatgtggttacttatatacatagccaaacaaaaaggcaaggaagttatgggtctctttctaacggctaagaaggaaatttatgttattctcttgcaagtggatcatgcagggttggtcacattgaaattggggctctcccttgagaataacatataccatcattgacagaaagaactgagctgtaacatagcaaaagcttatttgttatttctgacgtcgctgctaatttcagcggttacactttgtcacgtgctccacaatcacggaaagaaaaacacacataaaagacttatattcttaactttctctgatgtcagacgttcttccaactcaacaaacgatttacctttttttccttatcaattacaaaatgattatttatctaccttatcttccctttccccacactcttctgttttaccaccacttctttttttgcctttttcaatgggaaaaaagtcttggttcgttagtggtcctcatgttctactgtatctcatttaccaaaatctgtagccttgtagctcaatattcaactttaatgaattgaacattttttggtcttgacaatatttaaggaaaaaaaaagttacaaagtgacaagttggaatcttacaagtcacaaaatattgttacatatgccattctactggtatcatgtaaataattttgatttacatgttacttacaaaattatgagggttcaaagatctgtcattcctttccatcttggcccccaaaaaatgaaataatgatgtcgacactataagatttttatcttatcctactagctccaaatataaatatttacaaagaataataagagatgggaagcaggaacaaaaacggggtatgtacaccaaaacgcaattatgccttctgttgacctcctcctgtcctgcaataagtgataatatcttgaactcgaaatcagcatcctggaaaagaagaacaaaataagaacaaaatttattaatgcgggaataggcttatactcttattaaactcctataatggctcaagataattgaattacaaaggaaatttagaattgtaacacatgtatatttcaatgatccatttctacttgttaaaattataataaatatatatgtatgaaatgcgcttataatataaaaatcctgggatgataaagatggtacttactatcactaaacaagaccatagctgagatccatgatgctgaatagataactttgatgctggcaagcagtctcaattaggaacacatcatctggggcatgtccaaccattacaatatccggacataatttagccaaaattaatccatccgctagctcttttaatggaaaaccaacaaatggcattcgatgataattgatatcatactacacatcacagtccacacttgtcagcaggctgtctgcactaattatcaaagatttcaaacttccacactatgaatctgacttgaagaaacgtgccattgctatgtagagcttctcttcttcaaatggctttgacacatagtcatccattccacactttatgcactcttcattggaagactgagttgaatctgctgtcattgcaagtattggaatgtgccaataagggatgctaccaaacatctctgcagatgcttgcccacacgcaattttctcatttacctcactctcaagacaacggatttgcctcgttgcttcaaaactgtatcatttaagatgaagagaaatacttgtaagttatatctcagccatgtacccagaattccaggtgtgagatcctatctagaaagcactcagtaatctgttatttcttacacaagttaaaatggccatcgatcacacctaaggatatcatgatagcatgcagattggggaatttataaagtttcttatatacactaactgagcccccaagaggatatttcttacacaagttaaacgcccccctagaggataaaaaaaaaatcacaagatagtttcatacattctaataaaataaataaattacaaggcaaaagcctaatcattatatctatttacataagattgagtggacacttttacagtttaacaacacggccatgaggcccgggaaaaatcagtcgtggttaaaatattctaggtagtaggttcttaacaaaaggaaataagggtaagggcctgacttttggcaccagttcctttaattattatctactgtttttcacgtgttttctctggtacaaaataaacttactagaccagtcattgctccttggttctattcttataggaaagaacagtgtctccatttgcattcaaaattgagaaaactaaaactaaaataaaaaataggaataagaagatatgttacccatccatttctggcatttggagatccatgaaacaagcatcaaaattatgtggcagtttaagcatctttagagcagccctgccactctccacagcagtaactttagccccatatttctgtagaacaccttttgcaactcttctgttcactgcattatcatcaacaaccaaaatttgtttgtcaattaataaattcccgagtttggacacttttttcctatttactctcttgttttcagtgccaagggatactctgtaacactgaatcaaagaactaagccaaagaggcttcatcagtatatcatctataataccaactgacttgagcccatcctgttcattggagctaaggtgggtggccaggagaaaaatctttggtaaattcattggatcccctttgatgccattctgtctacgtttcttgattgtgtataagatatgacattctttatcccaagcatccttgtctataagaatcatggccaactgggtcgacatactgaaggaacaaaaacagtagtagtaatttagcaaataatagcctattgtccagtacaagttttttttttataaaaaaatcaacaaatataaactagaaataaaacaccatgtttacttcatgactaattgcaccttaaagttactactgttgaacacaagcaattgccaatattgattaaaaccaaccagtagcaaaaaaagaacaatgcaatttattaataacaatataggaaccgaatttcctacagaacaccaagcagttcaagccttcacaagatcacgcaaaattcatatccacacaaaagcatgcattgaggattgggtcagtctgaaaaaaaaaacatatatttcatgtgtacaagttgtttactaagtaaaatgatttcagaatataaattatcagtatcacctgctttatggggaatacaacaacaataaagccttatcccactaggtgaggctggctcgtgtgatccatgtagccgctctcacctagtgggataaggctttgttgttgtattccacataaagcaggtgatacagataatctatattctgaaatcattttacatagtatatgacttgtacacatgaaatatactgggtagtgccctgatgctattgaagaatgacagaacttaaataggtaagttcttaaggtttattgtgcgcaactgtcaactgatttggatttttaatttcaactgctaaagtgagtcaagtgacaaattacctcttgttacatgcattagatagacaagagcatgcagaattcagactgtaagttacatccacagacattcccaatctctgcagatgatatcttgtgacctcagctcggatttttctgctatctaccactaatgttctcaatccttggaactctgaaccaaaatgattattctgccgcattgcatccagagacgtgctttctccttttctgaaagttccggtaaaggaaaaagtacttccaattccgggctcacttacaaatccaatttctcctcccatgaggtcaactagacgtttactaatgctcagtcctattccagttccaccatatgttcgggaggtggaactgtcagcctgcataaaaggtgtgaatatgcggctttgtgcatctgtaggaattcctatacctgtgtcctcaactattactagaagttgaataatttcaggcttatttatgccacctaactgcttaaaatttgcccaacttttccatctgttgcatacaggaaacccacttaacgtatcatatgttctgtttgatacgttctggttcaagtttaagccttctctcagcactgcgtccataatatgaagtgggttcttcacttcatttgccagatgaacagagacaaatacatgccctttatcatgagtgaactgaaatgcaccaagtaaactgattaatagagaatataaataaccaataagattccttcttttttattccaaagataagaaaatacactaatttaaaataaaaattcgaaagattattccaaagtctaaatagaagggaggtaaacatataaatccttcaaattgtttatgtagtattacaatgtctgcccattgcattgcatgagtcacttactagtgagtatatatataaggtgatattgtaaagaaataatgaataaaaaacaatatcaccaggattatcaatgaatttacttattaacaccatttcaatatcaatcagtaaagggacacactttcaaaaggacaaaatgatgcattgtttaaaattatgagatgtttccagcatcatgatatatgcaaagaataaaatgggttaaacccacccaaaaaataacaatacagcatgaaataatgcaaaccttaagtgaattgccaacaagattagtaattatttgccggaaccgtttaggatcgccaatgacaactttgggtacttgattggatgtataaacagccagctggactcaccaaaaaagtatagagaacacaagttcatgtaagacttaatgtacaaattataggaggtacaaaactaaggtagcggaaagatacgatctcacctctattactttttcattagatttttcagagaaaagtgataaaatttcatccagaatagctcgtggatcaaaggctacagcttcaagctcaagctttcctgcctcaatcttagcttgatcaagaacctcgcttatgactgagataagatctttaccactcttgtgggcggtttgggcacagtccatctggttttcatcaagctcagtatccattaacatttgcagcatacctggaaaattatttgaaacagctgataattattactgagtattgacaggttgggtttatctatgaaaacaacaaatactttcaattacctaaaacaccattcattggagtcctgatctcatgtgaaactgtcgcaagaaactgcaaaaaagggaaagcaatccttggaggtcaaggtggaaatattaattttaattaagtaaaagaaattataaaccatcagaactcagaaataactttgatgttgaaagatgatcatcatgtgatgcaatatacatatgaaatgtgacaagaattacaatattcttgacatcactctaacaattgtgcggcataacagaaagcctaaaaaaactacgtaccccattgcccagagactcctcgctaagcgaaggtaagggggagggatattgtacgcagccttacccttgcatatgcaaagaggctgtttccgaattcgaacccatgatcaacaagtcaccaaggcacaactttactgttgtgccaaggcataacagaaagcctaaatcccataaatatatcacacctgagattttgccacatctgcagcttcagcacgaactttcagctctctcatttgacgatagtcatcctcaacttttgctattctatttattgctgcataaaaaatatgacccagaagcaaagtaataacaaacacccccactgatgcattgattgctgtccaaggtaatggaggcctctgcttgaacctgcaaaagaaaaggaaaagaaggaattgtgctggtatgagatttcaattctttggacacaacacaatttttttaaagtgtgaaagcaaacctgcagtgcatctcatgtttgcgtagcggatccccaaaatctaggctgcttatgtatagtaggccagtgtcagcaacatcagtaccatacattgtgattggtgcagatgcattagttgtgtcataaacatttacaacaatggtttgtttactggcaagttggtgtagaagcttgtccaccagtgatggaacatcataagacgcacccagatacctgccaataaataggtaacaatactcacataacactgtaattgttttccttttaggggtggtggatcagagcacaaatgaaatgcatattttaaccagtagacaattagatgtaggattaccccacagtagctttgatacgctgctccagtgtagcatctaaaggaagattagtgttatagacagcaaatgtaagtacaacacccagatgattggactttagtagtttaaaaggggatgtcagaaccccctttccagacgcccttgctctcaaaatattctcacggtcctcctgtgtaacaatgcaacaaaatattttctgttaaccagacagataatgaggaatctaataaataattcaatagacaatagtaactcctagtcttatttcttcttaatctgtcactgagatgaatgtaaatcaactgattaggcatgaaaagcatgtgataccagtgctcagagtcattttattgatgttgataagtaaaactcttgtatgtagttgattctgtttaccccacatttgactttcactgttcaaagtaaattatataagatactgtttagtgatctccagttctaatattccacttcatgtatacaaaagctccaagcatctaatgcttcgacctaaaccttgcataaagaaaatacagacaaaaaagtctttctaactgatgacttcacactctagttttctcatacatacttgtgcagaataaatatggtacgaacattaacaggaatgtaaaatttgcagtttaagccattgccccacaatttgcttagaaaaagtaaatcatgttagggtgacagcaagctaagcaagacacaccttccctgacatcatgtcaatagatacaatatgggaaactgtttcttgagcaaatatcactggtgcatattcatcttgaataggtgctggatccaaattttctggaatacaatcttgtactaatgcctcattctcagtttccattttcttaattgtccacccatgctgcttctcaaaatgcatcctatcagagtggagaactttcaaagcataagcaacaccactagtaagtggtctttcaaatgctgtactctctgtatattctccaaaaattttctgcagtgaaacagaagcttcaatgttatttatccttaaattttcttttgtttttaattgttttccctcaagatggataatattacaacaagaacaacatataaatagcagagagttgaagaggactcataaatttaatgtggtttcaacatggagacttatactatgcaatcttcacacatatccaaaccttactggtctaatacaatcaaattcagtgttaaccatatcagaattacaagtgaaaagaggaacccagttcaaaccttgtacacttttttgtaagattagcatatacttaaagcaggtataaagttgttaagacgttccgcattagctagaaatatggccaaatactccttgaaaggcttgagccttgagtaattccccctcccctttgagctaacttttagagttaagttagatcccacccatttcaaatatgataccaaagtctattcaatcttgatgttaggtacctgtaaatgtctagtcttacaagcttcacactccgatatgtagtcctgggcatgaggggatgcatgttacgatgctccacaatggcttaaaacatggccaaattattccttataacacttgggcaattctctccccctctgttgatctagcttttggggttgaattaggtctagttcatttttctaataaaatttataacaatgacaattagaaatgtggtcaaacatgcttttcttattatagctagtaaaagtgccaaaagatattcatttgataccctcattcacactctcctttcagatttagtttttgcaacaacattaccataacacaatgaaaaaaacagagagaagctagaaattttatctaggctagttgtggagaaaaaataaatcatatagcaagagctttacttcattatctatacttttcaatagctcaaacttttgacacattacggatcaatggcacaacctgaattcctccattttttttgtcaatattatcatatttttcagcatccccacctttttccattacttttgttcattttattttattttatatgtatgcagtttttgctacatgaaagtgagcaacagtgccttttccctagtttttacagatcatttggatcagattttgctttccttagaatagaaaaaacttacatttccttttttactatgcagccactcaaatatgttagttagattcacataagatatactaagcaaaagtgtctaggagacatgcaaaatatctggagtcactggccatgaataagtctgcataagatgggagtgggagaataccaataagagaagagaaggacattgagtacattacctggtcaattgcagaaggatgtttaccatggtgaaaggtagatacaaggatagccagagcatgaacatggttcatgctcacattaaactgatcttgcagcatacgggctctctcatcacacatatttgctagcgtttcttctcttctccgcataattcccatattcaggtgccaaaataaccaaaaggacccgattattccaagtgacacaaatataactagtaactttttcctccacctcccagcaccccttgaaggacctcttggaaaatgtttcaaccacttttgttgtgcagctggatgcccctgaactagcttctgcttttgattcctccatagtaaacagaagtaggacattataattccaatgaggacccaccagcatcctttaattaaattagatgaactcacatgataccgaattgcagataccctcagttcccatgattgcacaatgttctgcaaagccaaaatgaattagcaaattaattatatagtggaagtatttgtttcaaataagcatgcaaggagtgcatgccttcatagttattggacaagcttacaatcagaatctatggtataaatcacattcacaagtaacatgggaaagacaatatttggagcaaataaaccaaaatccactacttttccttgatatgactattattattaggctgtaggttgaatgatttgaaagctagactatgatcggtgatgccctgtcttttacacatcaatacaaaaatttattatagcactagccaagctatagaaagaatgctatgatgccagataggcaattcaagggaatcttttgattacattcaagtgcatacaaaatggtaccactgtagatccagatgatgcattattaatagttacatttctcacccagcttccacaaactgagcactcttacagaaaatgatatttaggaatcctaaagttcatcactatgcttctttttttatctccattcaatcaacaaccatattatgccccccagtataggttgagcagtgagaaaagagaattgtaagctaggctataattcttgggtactccctaatttttaggagaattaacaatttatattatggaacttttgggcataacaaatatatgccttagctttagtaaagattctacctttccgtggtgcaaataactaaccaaatcagttgaaagtgcagagtgcgaggccaatgatacacaacttttcaatgggaatgataattcaagccttgtctggacataatcattgagaattggacattgttctgtaggttctacagtgtctgcaacacatgtatgctcattttgtaactcttgattctctggacatattaactgtggagtactgaccatgccgctgcttaacagcatttgaagtcttctttcatcaatacagttggataaaatctgcatcataaacttagtaagacataggacaaagagcaccactttgttactattcatattcatctctgcaacaaccactgttttctattaaatatctagcaagagagtatccatcacttttagaacttaaccggttgtacaacataaagcgatcctagagaaaccttgcggaaaaagcatcagaatagcatagtttataccctttcatttaagacaatctattggttctcaatattttacatctttcacttcatctcaaatataaaatccaacaagaagttgtttatttagtgacaataacgcccaatagaaagaacagttaatacatagaagaagccaaatagttaaagtttctaagcaaaagtaaataattatgaattatcctcagcgaccacgatatggcgccataaaattgaaagagtggaggggaaagtgtagctcacctgatctgatccagagaacaaggaagccaaagcatgaatctgtttcctactaacattgtaacgttgtagcaaggttctctctctctcttcacaaattgcttcattctccttgctgaccaaatacttactattgaaactcaagatgaaccaaacactccctatggcaacaaagccaaaaaaccaaggaagcaagggcttcctcctacatgtcctgggagaattagacccatgcagaggctcattcagcttccaagacttcatatttgatagcaatctaccatttgaagcaggaagccttcgattcacagacatccttgccaaattcaccaacgtaacagtcctggagattcaaggcaagccccagcagcttgagcagaacattcaaaaagctgaaccaccaagcaccccaccatgaatcttcaactgcaaaagcaaaattgaagcaaacccaaatgttttctcagcaatccacccctcagggcataaagtttggtgctttatgatacttccacaaggcaaaagagaaaagttgcacaaaacccagttgatatatatcaaggaaggagctccactatgcttggactggagtggcccaaccaaaaagtttgtttttttgtgggtatccgtgaaggttgaagttgaagagataacataacaagaagaggaggaagaggagcatggggtaataatcacaccaaatcaaacccactgagaggagctgtgaatgagataggaaaatttgttctttttctataacaggttgtttctgcctcactgacctctgaacacccaacagaagcatcaaagagtggaacaatatcacacagtgaccatcatcttcttgcaaatttgctgatataacccattttgtttttcagaaagaaaatgttaaatgtccccccctctctctctctctctccccccagtttggtgtgcagcattagctaattgaggatggatcatgattatctcatcatctggtggggaaggtttaaccaaaagcaaacaaaaatccatgattaaaaataaattttaaaaggaaaataaaacatcagttttttttaatatcaattattactgtttagttttttcagcaatatatagcataattgaatttttggttaattttaattctttttttttaacttcgatttggtgttttgcttttgcaagagttgacaaagaccgcacccttcagtgtttaaagagggagtactccaactgtgcactgcagaatacggatttaagtgccagaaaagataaaagagagtcagaaaaaaaatatgtgagaagaaatggtccggtgaaacggtgagagaatatagagagagggaataagattttgaaagatagggagagagaaattaaaaaaagggtaaaaatggtaatgcacgtagcacattgtccagttcccagttccatcataagtggaaagtaacactgtaattttatgttcaaaacgtactggaagaagaatgggcaattattcagaggggtaaaggctaatgtgcgcatggtgccaaaatattctggaatcaatggttttgagaaaattatataggtttgataaggggtatataggtgtaatgggggcatcaaataaaatgaatgtcggctatataccttacccaccaatatataataatgaacgaaagtgagaatcaacccagaaatagtactaaacaaagtgccaatttgattaaaaactactatcaaaagcataattggtttgaccatcattgcatggatattattatattaacttaattttttttatcattttaaacatttaataaggtaatcttaattaggtggtgatcaacggcacaaaaaccctcatatacagttttagagtttagatctgtgaatttcttgccttgagagttaatcatcattgtgggatatggaagtagggttatgcctattaattaatgatgatatatgattagtgagaaatacttttttcggaaataggttaagttttaaagtggagtcccacttttatgatttttgctatggcggtgagatttgtcatttctagcaaaaatagtaactaccaacactgttttacatacagccaaattattgctgtttattgtcatgccactttttcttgcgatccagaacatttccagtgcttaaacaatattacaatctttacattaatcaatgatgctaaggagaacctgttatacggtactgttatgttggaaagttaagaatgtataagtttcactcagagagaagaagttttcatagagttcaataaaagaggaggaaatagtatatatacctacctacataagtaaaacctagctaagagtggtagacagacacagcacagattattgtctaatgagattacatgagcttgaatatttccttgacgagttggtttcatatgctaatcacatatgtaagttcaactggatagccttgttattgtttatgtaagtcaatttatttctgtaaaagaaaagtcaattgattgaatggtcttttttgctgtgaaaatatattgtgtacaacatactttgtgcatatccacacaatttggattgagttaataaaataaagcgtttccatttcttatattatagtcagatctataaacaaatttaatctgtattcatactttcttgttaagctaaatataataataaactctttcataaaaaaaaaaaaaacaaaaaaaaaaactcatctatttctcattatgtggaagggagggggtgtcctactttctaatgtagaattgaaaaattaggaattgtttgatttgaaaaatatgtttttaattttaatgataaaaatgccatattattttcctatatttcttatttacaaaagttataaaaagaaaaaagtaaaatattttttgttattttttactatttcattatttcttaaagaaactaaaaatagaaaatgaaaacagaagcatttcctcaaaatcaaacaggtctttaagtattaatttttttcacaaatataaattttcttgtaatttttagcatttaacttattcatactaaaaaaaagttataaatcaccattttttaaattctgtgataaagggtaaaaaacaaaattccgtattatgaatgcaggtcagttcgattcgggtgatataacaacatattggaatatgatgatgcaagctgaactagctgtgcttcctattggcaccgttactttgttttttttaaggggagtgttcgatcatcattgccaatttggcttggcaccattactttttttttgggctgttcatagttggcaatttggcaccattaccatgaagtacgtttatcaagtaaaatcataaaatatttattcacaataatataatatttttcaacgttattatataaacaatatcttccgccgaaaataagttgacatatagccagaggtaagtagtggctgtatattttacgagaaagaaagtaaaacctacggttttaggagccgtttagtttataaattgatataattaattttaaattgtcaatagtgattaagatgtattttaaaatgaatttgaattataatttttacatcttttactataattataatttttacattgatatacgtgttgtagaaaagaaaatatttttataagattggcaaacagaacacttgagggtcaaaaagaaagtgaccagccagaaaagaattaatccaatcatcaaagcaactcttagatggttaaaacttgtagggccatgcttcattgtaatccacttcggcataatggcattggaagctttgttactttccctttccaacttttcttttcacttcttgccatggaaactaccacgctatattaatttattcatcttttgaagctaagtactatgttcatgtgggaagtgcattactgtatggggcacatcgagtaactatgtgtaggttcaataattacaaaatccagttgggcatagacccaccacaatgcctattattctccctaggaagatttctcttcaagaatatgcattctattcctaattattccagctacaggatttctcaccttttatttgtaacttattgatttaacccattaaagacatggaatttataatctttcgatctattttttttaatttctttttcttgctagaatattactttttcttcagtcaatggttttaaattaatgaatagtaacaagaagaaactattttcaaatgccttaaatttaatacaatttccttgcatggttgtacaataattattttctttatgtgatattattttaaacagaaaccatcttattgagggagggggggagtatttaagacacagcttaatttaggtttggtcgccattttcgtggttttcaagaactaccaaacaaagccgtttaccttcaaatctttctacaatatgtccgcatgtttgtattgattaagaggattttataatgtgaaatttagtattgtacggctgttacataataatccaacgattcaatcaatgttccctcttcgatgtaattcagtgatggttaagaattaagaaatatataggtcaatgaaattatttaaggacacatgttttatagtctactcaccaaagcaaaataattaaagaaacttgtggacaaaggtagggatatatatatatatatatatatatatatatatatatatatatatatatatatataaccatttaatcataggttaagagagtaagtttcaaggttaatttaatgactgcggtctctagctttcagggggagggaagggaggcaaatatatatttttctttagtgagcgtctaattttcatgttggaaataattgtaagtagagatttcatttgtctggctgaatgaaaaatttgctatccacgtggatatctgaaacaaatattcacaaattttataaatattaacttatttattgatatttgtttttctatgaatggaaactaatatacaaacagaagaatagaaactaaagagtaaatagtaaaagagacattagagacatcagccaataacagatgttgaagaagaaccttgtcgagccaaccagtcgggcatattgattgtcctccctataattatgatcatgcttgaaggacagatcccaatgcaaatgcttgaagttagttatcttttggataagtgctgcatatggatgcatacgaatatcatcctaatccaataactgaagagcaactgtagatttgttgatattttttttggtctaaacagtattgatatttataagcatctatgaatatttatttaaatataaaactttataaaaaaaagtaaaaaaaaaaagagataaatacacattaaaaaaaattagtacaatttatcttatacataaataaaatagtttaatgattatacagtattatcaactacataattttaaaataatcataataaaaattaataaatttatcatacatgaaaatttataattgaatgataatattttacattgtcaatgtatatgtatgttcttcaagtaagaaaatttaagtagtttttaattatttgtactcaagaaaatagataccttattaaaaatgttcaaaatccaaccaaaatgtttaaatcatcaaattgatcccaaaaagattaaaataactaaataatcaattttttcatggtcaattcgttgactgttatacacaatcaatgaaagacttttacaatgtaaatcaattaaaaagtactattgatatgacttttagttgtgaaggtcaataaatttttcatacataatagttaaatacatgttttgaaagattaaatatgtttttattctcaaatttagatcattttttttttggttctttaaatttaaatttattatttttagttcctcaattacaaaaaatgcccccctgaagtaaaaaagtcacaatgcatctgaatagtcaaaaatcaattaagaatgattaaaaagaatattttttaagagactaaaatataaatttaaatttaggaaaccagaaataacaataacttaaatttttgggacaaaaatatatttaattttgctttgaatgaaagacttagtttgatccaaagtcaggttatattttaaagaataaaatgtaattataattattaattatagtttaactattttaaattaataatcataattatacttaactttttaaaacgcaggtccttcattctataggaggcaaatttaagattgttagatgcatatttgtattaatttacttaaaaaatataattacttattttatacttataaaataaatattaaaagaaaaagcaaatcactaacatgatatagtattcgtaagataattatattttttaagtacgtgattaagagcttaattcttatatatatatatatatatatatatatatataatatagtataatataatatatcagaatatattagttctttaattagatttcgataactgaaaattgcaaccaataataaccctaattaacataaaaatgtaaaaatggcccaaaagaaattgcttattcttttgttttgtatagagaaataaaataagagtaaaaatatgtaagtgaaaaaaagataaaaaattattgttggtttgatttaagaaaaattaagataaattaagtaaaagagaaaagagaaaaataaaataaaatatcataatcgattatgtaaaataaacatatgtaagtgtttggacatgtgtttatgatacacctaactgactcatatcgatccatgttcaaggttgaaactattatttgtataaaaaaaaaaaaatcacgataaagacacgatgcctcaatgtcaatccaaacatgttgattatcaattatatatgttttttaaggcattattttgtcattttcatataaaatgtaatataatttattataatacaaaaatgatccattattattttatcatacacccttcagtcaagtgaacaacgcttctgagactagattctcatcaattctttgctatttcaactttcttttgcaccaaaatatttttatgtaagattcacaaattttaaaaaaaatttcaatacttcttcatatgtcaaactatgaatttcttataattagtacttgtttgaatacttgttcattggagaaaacacatgcacgttcttgagcacaaagaagtatttccttaattacttttgagaaaacagtcattacattcaacgaaatgattttgtaaacataatcttaatcactttttcgtccttttcaactcatttctgatgtgtttctcttcaatcaaatacaacataaataaatttcagtaacttgagaaattggtctctaactttcaatttgggatactgcacattcaaaaaaagtgaatcacaaacatgcagtagagaatagagagagaaaattgaagaataaaactacgtaaggtaacatcagacgtttgatacaaggcgggtaccaaacattaacaagaaatctgaatacagtggtagatggcagccaacagcatgtgtagtctgcctcggatgcacaataactgctcctttcaatttcagcgtaataagctatgccctatgctttagtatgcagctacctagctagtctattcccagttagctagagagacacaattatgacaataatcaaataagatgatcatttttatttgaataaataattaaattcatcttaaaacatgtgattccatgataaattaatttatgaaaaataaaaataaattcaatttttaatatgtaaaatatatgataaattaattttattattaaattttaaaattattttattattaaattataatgtttaagaactaatttcacaaaaatatatatttttaaaaatcaatttgatattaatttacaagtttaagaattaatttatcattaaattatttatgatactaatttattgtattttttacatattaaaaatataaatttaactatttattaagtaaaagttgaatgattatatactttggatttaaaaatgtattatatcaatatgatcatgtctttgttcaatttttcataaatgaataacgacatattattctctcgctactattaatcttcttaagattttatgaaagaaacactgaataaaaaataaatatttaatatttcaaaatatttaatatttttatttaataaataaaagggttatatagtaaaaaaaatgtcgctataaaatgatttattagaatgattctttataaatattactaaatgtcatatttttcataattcttcctaaataaaatcgacaactgtaacatgtacaagtctgaagttgacaacttaatcaaaatagagacaaaactgataaaagacaaaagacattataaattagctcacctatctattttcctgacacacaaccttgtcttgaccaagcttggtagcaacctttgctctgctgatttttatctttgcaaacgtctgtaaccctcaatattagctagctagtgaacattaattatttctgtaaggttgatatattcatcaaaatttgaacttatataatatagtgtcagttagctgtttatattttataataatgggtgtgaagaggacatgctgatgcaaatggctttataaattgagcatgaaagattataatctccaagcttgtcttgaaatgatttaccatattgactcttggtcaaattgaagatttcaaatttatttttgttttactcatataggagctagcgtttggagaccatttgggtaagaaggtgtcccccacctatggtggagacacgactaccacttaaaacaagtggcagttgaagttttcaacagctgaatcaatttagagcatgctcgtgtttcaaagaattaaaatatgttggcgaaaaagttttaagagataagtatgtaattaaaatacagaatgaatattgaagatgaaatttatatgattcgtttttataagagtgttctaactttaaggtacagattaacaaaataaaaatagtattatacaaaacatttaaaaataatttaatatttgatttaaaagaatttaaaatgtttaaccataattaatactcttggatttttcattaatgaaatcattcttttttttagatattaataagaaaatcattcttgaacatacaaaaattaatttttacattaatcaacattaacttatttattttcttaaagttaagttatttatttatgattctaattgtatatgttaatgcgaacttgctaatttaaagcaatgctaattgatgatttaaattaaataattaagaaagtaaaaaaattattattacaatatattgtgagatgaaaacgtttaaaaaaaataaagttaagatgcaaacttttaaagatcattgataaatctacaatatatccaaatttatagattttttttaacatgtttcaaagcattaacttggtggaatattgtgagaaaaaaattcatattatatattttttgtgattcatgatttcaatggtttaaatgaaagaaaaaagcgtgaatagacttctcttttcttggatttttaatgtagggaagatgaacaatagtgagaagcttcaaattttatatctcctctttgtcaaactctagaaatgtgattgaagtcatcttggtccccgtgaaaagcttaaatatagatctatatttttcatgaagattgtttgattagattcaaggtggaacaacaaaaagttattggtataagtggtttgtcacttaggtttcttaatcaatatttgagatttaattttgacttgacttgaatatgaagtgattatcactttatctaaaaatagaataacgatggaaagaaattatacctcttgattatatataaaaaaaaatatatagaaaaaatatacctcttgattcaacgcggaacatagacaaaattggacttaaagttgaagatgacgcgttgtcctaccaacatcaacgcaagtgcaatgtttaaagaaaaaatatagatctatatttttcatgaagagagtttgattatgattcctctacaacatcgtcaaaaacaaatcgacacaagtgcaatgttttgagcatatttagagatgcagatgttgaattgtacagtgtttgacaggtgcaaaacacgggcctagcgtgaacggagtccctgcatatcgctactggacgggcattgttcattgtcgagtgcgtaatgttcactgcttaacgttgaggcgaactagatttgtggaaaatttcatgtctggcgcgattcgtctaagaaattatatcattggggacaatttgtttgatcttcctaggactagaagcgagaaagacttcgacgttcgaagaaccattactagtggtagagaaaaaatgagaagagaaaaaactaaaaaattatagacaaacacaatttgtatatctcaataatttttttccttttaattttttaaccaatactcttgggacatgggttagtatttttcaaaaaattattactcatttttttttcatacaaagttttgataaacctatgtttgccctgcagacacctgtacaatctcctgatctcctctaatatgacattgacatgttgtttaactcaacaaactgcttctgtctgaagttaaaagttaccaacgaagagttctgtgcctaggactagctgttttcgtagctaaaatctgaaaaggatttcctatctttgtctcttaaaacacatctgtcatcgctttatgattcctctcctaaaataatttttattcctatttccttacatactgtgttcatagtagaataagaaaatgggtcaaactcagatatagctcgttgattttcgaggcttgagtcacaataatcactccttgatgggtatgtaattcatgtaaaacagaaaaatgtgaagtggagattcaccttcctctaaaaagggtttaatactgaatattgataaataaaaaaaatcaccttcctctaaactccaaaacaatctcagcttccttggctaacaactacattctccgtacctcatcatgcacaaccggcctcccgcctacattcctagaaaggggaagaaagtgtggcaacataagcgtgaaacaataacgtggctataaaaaccaagcaaacggagatgtcattgcattcatcacacacaatcacaaacagtaaacattcaagcaaaatctcatcctttctctaatggctatctggtttgtgatccttcttacattctttgccattggtgaatctcagtccacaatgtcattcaaccaaaccgacctgcaggtagccatgactgacatgagaagtcggtcctactatggatttgtcatcctcctcaaaatactcaacagccagcccaactcactgcaaaacaatgatttgacattcctaatgccaaatgatgatgaactatctcaattctcaatagctctagaccagcttcatgatttcatactcagccattctattccaacaccattagtgctcagccatctattacattttccaaatggctctgtggttccctctagcgttccaagcagggtgatcagcatcaccaacggtgggagaacaggtttgtttgtcaacaatgcaaggattgtcacaccaaatgtgtgccaaagctcttccataagatgccacggaatcagtgctgctttgacatttgacaacatggtgccttcccaccgagctccaaaacccaaggagtctccaaagaacagcagtgtgacaaacccatccttatctgtcaaaaagatgaatatcccacctttccagtaaggcgagaaaaatactttgcccttcagctgtaatgtcgtttcgttttatcaataacataatattacttttactttgtctccacaatgagctatttggcctgtagtcctgatccaactcactcaccacaatgttaaacatattgactaactaattagattccacaaatcaagaaacaatcaataatttgtcacaaatgcgtattcatacatacaccgcatagaacaaaccgaatttcaatctgagttaagcctttagttactagtacctcttcgatctacaaaaggcttacaatgcttgaaactaatggaattagactaactcttcatcaattgtgcaacagaataacattgctataatatgtaaaagattataacatacactgaacccgtactcatgggtttgttctgaaagggtgggactcattagattgaccgtctgccttcggaggaacactgtagagaagatcatggattttggaatacatcagcattgaagatgggtcacccccactactgctctgtgatacacgagaagtctcctgcaatttgatcttctcatacagatattgcttctcagcctcagcctcacttaatttttgcttcaaatagttgctagtatattcttcctctgatttatctgacttggcaagagcaatcctctggagccgctctgcctctcttttagcctcgttagcctttaactggaacatatcagcctctgcatttttaagcctcacaattctctccagttcttcaatctgtaacttctttttttgcgtgtccattttcagttctcctgcttctctggccttgtctgctaattcacgttcacaagcatcaaaagccaagcgagctttcttgaacattctcatcttctcatcagctactatttccatctttcttatagcctcatgcaccacttcagcaattctattgcatgcctcctggggagcaatcagccttccactttctgcattttccaggctttttggagagtccagatcaagctcttcatatatgaaaagcattggttaaaacaagaagaaaggataattaataaagtaatagaattaattttattgattatacatgtttttaactatgcaaatcacaatttcattcctagatatcttcaaattcaggttttaatgaagagaaagcaggaagtttggagataacctcaaagtatagtctaaaagcttctttttttaatcattcctaacacagttttaatgaaatttcaacttttcagtacaaacaaatactactatgatatgaacatagtaaatgggcccaaaaaaaaaatgccaaaaacaataatgttgtattcacactaggtgcatgtgcatccatgtgcgtgtagcctatgtcaaggcagaaactttaaaactacaatttgcaggtaaactagaaaacttgtaccttggaaaaccatcaatattgccctgcatgctgccttagattccactttcccacttttcaatttttccttgagatcatcacacttccaataaagtttcctccctcgtgggtctttactaccatgaaagatcctactgacaaaatcaagttccctcatcaatgcctctccatcccatgatggtgcacaatgctggaagacatctttaacccaacccagaagttctgaagtcctgttacatgcttgacacctgaaaaccatttcacttggccctgctccattctttgcagaagggcccatacaaataagttgctcacgtatggcacagtctgtgtgagtccaatgagaacacaaatcacatccaatccagcggcatgtatttacttcaaagtcaaacttgctgcagataacacacatgcaaagattgcagaaaccattgccattagtgcacgtctcacaggtacaatcttcagcaggaagttggttttggcaagcaatgtttctgcatctcttgtacacaaatatttcaatcagtgatgtttgtgatagactgatgctaggatgtaaatatccctgaattccagtatttattgcaacaaggatttcaagctgtacacgatgtgctcttatcaatgtcttggctgttaaatcagatctactctgaacaagcttttgcaaaatgaaaaattcttctctatgctgtgagccattccctccctcaaggataactcgaagtccatttttcagttcctcaagaaattcgtcaggtaaaagatgcattttctcacatattatatcaactcgttctcttgcaatgtcctgaagactaattttgtctgcactagaaacacggcgaataactaactgctcaggacaatccatctctgcttttccattctccatcttctttgcagcaattgcatcagcagtaggccaagtttctcgagaactggcactttcagtaggagattcacggagattgtcagagtttgatctaggctcctcgggagaaaggcggggatccgaagaaactagagatagagaggtttgtagtcctccaacccgtgactgctgtggtggagggagcattttctttttctttttcacaaaggcttctgttttatgttagagcctggtgacctacccaaaaaatatttacttagtcagtaactagctaaggggattatataccactgcacatgattatcacatattctttgttatgctacaaatagttaaatactaaaatgttacaaatgagcgaggaacttgagaaaattcaaaatctgctaaaagttgcaggcttacagcctttcatcctctgcccccactccacataaacctccaaaacacagaaacattacaaaagacaaagcaagtactagagactagagactagagactagagagtagagagaataattatcaaactatttagtaagcagtcaggccctaatttttccacaaactgatgccaaaaaacaaaatacattcgaaaaaacatattatcataatctacacaataatcacaggaaaatccatcagtgataacggaaaagaagaaaaattagaaagtttaataccagtgatttcactcttgattctattgtgcaacgagcttcttatcaaatgaagaagctcgagagatatgcaatctctcacagaaactatgatgtcacacaagtccactcatcaactcaaacaatagatcaaatgataaagatgcaagttgaacgacccagcacagaaagttgacattaaaattgagacataaaagtcgctgcaaaggatgtttcaaaggttgatcgaaattcacgcaatcacagcaaaaatatccttgaaaaaataagaatgataatttggattaaaaaggagaggaaggttaccagagagaggagaagaaaaatggaaagaaggctaatcgattggagtatgtatcttccttgttcacaacttaataaaagaagaaatgggggatcaaagaagagaaatgggttggttaggtcaaaataggaatggtgtgtttgcccattttaccctgaccggttcagaccgggaaaaggacggaaccggcgaattaagaagaacacgacaaaatagaataatcaaattgattttatttttgtttgaactgtggaagtgggaaggaaggtggtctggtcgtgttttccaacgatgacttgttcacacggttgactagcgttacatgtttactcattcataattgtgccatctttttcttgttgggcggaagcgttaattaactctgtcaagtaccgttaattttccaccaaattatgccaagtcattacaacgctcctaatcgaaaccattactcttcagtttcattatgatgggtaagtatgattgaaacaatttcaatttcattatactattactgttcagtgcttctttccttggtttctgaattatcatgaattgtgaatggtttgcttttataaattgtttactttcgtttatttttttttattttttttcatcttttgtcacgaattccctttaccttccattatgattacataacataataattgggacccggaccaagtttttcttcttctaatttttatatacattaattgtagctaacagtctatttttacttatgacatcacattataaattacaaagtgaaacaaaactctatattttttatacatctcatctcatttaatataaaaaacatcctcttgaatatctttattgatagattttaaattgagattttagattattttttagtaaatcttaatgtcacataaaattaaagatctcttaagatattttttttaatagtaaatctcattttaaaatcttagaaaaaaaataaaaaaaatttattttttttaaataatatttagatcttaataaatcttcttcaactcacatatatgcaaattctccgctcaggaataccaaagtcactgcaatgacatcaaattttttttcgcttttacctgctgcaaaattagctaagttgcagttatatttgtttattgaatgggtttcctcaaactttcccttgaacaggcctgcgacatttggagaaccttcagctttaacgttgatgcaatcatcattgaccaccacctcagtccaaaactgacgcttgccatcatttttctcataataatctgatgttttggcttggctaccacgaagaatagattgaggaacctccttgtagagtgtccatgacgaagcccgagaatgccatgtgggattagaaattagctgtagatatgggaccttgcatacctgcatgtatgacggatttaggatcctgggttagtaggttaatttattttaaaaaataaaaattgataattatcattatcatataggataattgggtttaaacacgaaaataagatatataaaatataaatttttaagatcaatatttacattttattaaaataagagggtacattaatttactcacatgtgaattggtaaggaggttcaaatacataaaattagaaaatgcaaaatataaaattaaaaagtataaaatataatattttaggacctatgttagtgattttattaaaataaggggtacatttgcccaccctgccaatgtagctccaccggtgcctgcaggtatcaaaaacttaaataaatgtccattttacaaccaactaaagtcaaattcggaaagagtcataccacgttttccagctctgcaagaactttggttggaaatatcctgtgagccaaagatttaaaaaaaatgaccaagaagactggatccatccttttccagtaaaccacaagatgatcataatagtgtgtgcatgtcttatgtctaagcatttaaattccaacacaactatcatgtaacaaagacccattcctctctcctttggcattatgaattttcaatattagttagctaaagcctcaaccacctaggagaaaattgaaggagctaaaggctacatgcagatagcatcaacatgagaaattaagcaaaactgacttgggcatcaatagaaattttggtaaaactgatgtcaagcacatcacacatcaatgcaaaaaatagatcagacaatcgtaaaacaatggagcctaaaatacatttatcatgccatgcataatcattcatcaaaaacaaatttcatttccaaaacgtgatgtaaatcttataagtaagcatagttattgttaagataactccatgagagggcttaatttatgaaaaatatatttaagttcagcacacaagattcaaaatatatgcactaaattttagcatcgatgaacgctattgattgaaaactaatgaatgatttcatatctaacaatacccttccaattattctaatattttatgttataagtactatagaacatatcatttgccaaaaaggttaattacaggagtaattattaaaatttaacttattcaattgagacaagaaaatataatcaaccttaaaatactaaagaaaacctcttcaatatagtcacatcacatataatagtttttgccttcctccattatatttctcctttatccatacacaatctgtaaaataggcaatttggcatgttgctggaatcttgtaatacatcagcaccacaatttagattattccaaatttccattgaccatatactgaacaacctttcagggaaaaaagtaaccgaattcaatgcatttacccagttgttattttatatcattgcctgataaatgaatatattgggggaaatatatcaaaatgtgttataatcagcatagaacttaccatcaagccattgttggctggctactttttcagttagggatgtggatggatatatttgtggataaaatttgtaatatatataaacagataaaagatagacattttcttttactggatcaaagatcacggatttttttcaatccacttgataaacacaatgataaatatctaaataagtatggatgaataatttaagcaatttttatttttgttaataaaatggtagagacagatattaaagtatatcagttgttttttattattatttgtaagaatcaaacacaatcttaagaaatttataacaactttcacattttgctcgatcacttgagttaaactcgttgatacattaaagtatttgttttactatactcgttaaatacttgttgtaataaaattatttaagtatttttgttaaaaattattttggatttgtgaaatttaaatattatattttattagcttttatttgaacttatagaattgaattatcttcgaggacggttcctggaatcttttttcattcttgggaatgttatttccaagaatattagattagaatgatatttttggatatttcaagaaaaatacatttgtttaattattaaaatttgattgagaatcttttttatatttccataaatatttttaaaatgtgtttggttcacattatttttttctaaaaatgtatgttatattactaaaatattttttaatatataaaataactcattatatacacctacacaataatacaggagatcaaatactgcagtttacaaataacattgaagaatcttataaatttttctaataaatttcttaaccacattttactattaaagaaacgaatacccttgtaaaagacaaacaacataaaaagacacatacaacataactttaaccaaactccaagtaaaccaaaaacacaatcgataaactgtcttcatatcaaaaaataaatttaaaaaacaactgcaacatacttgtcttctgtctttaaattcacaccctttgttatcaaagttgaacagtaaaatctgaaatactaacttatatatttagatattatattgagggtataatagaatttttacataattaatatgattctcatttcttaaaaatttatattttcatcctcttttcatgagaatcatctcaatataatattaacattaacatgaatatctcactttcctaaaaataaaagatatgaaagagtatttttcaattacctttaaataaatgtaaaaatatatattttgatctcctcatttctcgaaattcttaaaaaggatttgaatgaacaaacactccctaaagtttattaagttttgttttgaattcatgggactgaagcattttaatatttaaatttattaaaataaagtataataattaatataattgtgttgagtgtttaaataactttagttttgacctttaaattattttttaaagaaatggttaaaataaataaaaattatagttaaagcatctaaatatccacatatatttgcgaatattaaaaaaattgtaagatggtcgtgagtgactcttgttctatctccaatgatgttaagatggtcctcttccatctcctccgccacacccttcacctcttcaaccaaccgtactcctccaaagacacgtcgtcgttttcgggtggagtcgttgaagcggagttcgaaaccagcgtcggtggagttggtgaaggaccccaataaggacttgtgccgcattctccgaaccgaagccgccatcagaggcgttcagaacaaggccaagtcgtcctcccacaaacagctctggcccaaggcccttctcgaagccctcgacgacgccatcaaacgctgtcgttcgcactccgctctcgaggccagtaattaattgattttaggattaacattttctgtgtctgaactctgaaacaagtaattatgactgattattattattattattatcatttgcagatttttgcactccttcgtaagcaatactggtatcaaccacgatgccaaacgtatgcaaagcttttgatgatgcttggcaagtgcaggcagcctgaagaggcttctctgctctttgagatcatgttgtctgaaggccttaaacctactgttgatgtctacactgctcttgcaagtgcttatggtcaaagtggtctccttgatcaggctttttctactgttgaagatatgaaatcagttgttgactgcgaaccggatgtatatacttattctattcttatccgctgttgtgcgaaatttcgtcgttttgatctgattgaacatgttctagcagagatgtcgtatctgggcatcgaatgtaactgtgtgacttataattctatcattgatggatatggtaaggctggcatgtttgaacagatggatgatgcattgaataatatgattgaaaactgcaactcccacccggatgttttcacgctgaattctttcgttggagcatatggaaatgctgggcaacttgataagatggagaagtggtatgatgaatttcagctaatggggataaagccagacataacgacgttcaatacgatgataaagtcctatggaaaagctggcatgtatgagaagatgaagactgttatggatttcatggagaagaggtttttcactccaacgatcgttacatataatactgtcattgaggtgtttggcaaagctggagagattgagaaaatggatcaacactttctgaagatgaagcatctaggagtgaagcctaattctataacttattgctcacttgttagtgcttatagcaaagttgggcgcattgacaaagttgactcaatcatgaggcatgttgaaaattctgatgtagtattggatactcccttctttaattgcataattagtgcctatggtcaggttggcgacttaaaaaagatgggcaagttattcttggctatgagagaaagaaaatgtgaacctgataacatcactttcgcttgcatgatccaggcatacaacacccaaggcatgactgaggctgctcaaaacttggaaaacatgatgatttctgccaaaagtagctttggtatgttgtgctatttgctctttgataccttttctatgttttctatgcttggtctgtcctattgtgcttggtaggaaatgcctaatctaataagccttccttggtattcgagtgcatgcaactattgtgcaggacaatgttagatgcctattagtgttagtctgtaagtgatatagtcagctagttaggttgggctgagactggcaaagaaataaggcataatgtaaaaatcatgcaaagaggctctataaatctatatatgctgttaatttatcaggtgtattcatcttctcaaacttgttatgcgaaagtagcagttatgcataggtctaaagggaggggggtaagtgggttgagttaggcattctgttttgtatcaatgtaaatgaggaattgctgaggcatgtgggtggaatatagttttcttctagtccttggaaggcagaccatttgttctctttgcctttatatattttcttgttttctgcaatagtaatgcctgagttttgcttttcactagttggttcattatcccttgaataatttttatatcatcattcatcaacacaccttacccaatgtttgatcaacaggcactaagttgattggatgctagcatagataattgtgattcaagacttaacaattctactcatggggatcctgacttggaaatctttgagaacttcagcaggtaagcatagattcttcataagtacattattattctgaaggaattttttttacccgtcaatttggaagtcatttactgtattatgttcagaaaaacatagcttcctagttttattcatagttagttggattaaaaaaaaaaaaaaatccattaaaagcattgttttcactgaattctctttttccttcttatagctccttatattctactatgcctaaaattcacaagatagaagcctgtataaactgaatgtatgcttaagtctgaaatgtaacccagtaccttcaaaacactttcatagtcatcaaaggtacctcaaaatctattgaatactgtatcaagcagccaattgcagaaggtatcctttgatccaaagaggatgcctatcattcaaatagaattccttctcttggggagcaccctgttttgttcttttcaaaggaagttgttctttcttttttgtttcatattgaaatcttatgttttggattttaagatgattcctttactggttttcaatctaatcagtataggtgaatctctcttgagcatggaaattttttagtctgtatgtcacctgattttatcaccagtttcaacttttaattgtactaacatgcctttgtcatgttaagtacacaattgtttgtcattgcctgaaaaatgaatcaggaagaccccaaagtttatttcataactggttggtccaataactttgggttttgtttgagggtaaaaagtgggagaattttttgggtagaatttttaaggaagtgagttttatagaagtaatatttctttaggggggatgattttttttaccctattattagggtgaaacttcacccccaataattattgttctttctaatttctcattctcttgatcgccaattgtttcttcccgtgtatcaaatgcgtctgtgctgccggggtgacttttaccaatacagtcttttgcatcatcacccttaaactttgctgaatttggacatttgtgtttcctgcagggaatctatagatgatatagcattggagtgcacgttgcatgaagatataaaaaatgttgggtttattatcataatctgaagtgtagtttcaatcatcaaatttggcgtcctgcataccatcatgtatgcaactcagtcaaccaattgggttgggtgttcaattttgaaagacagaatacgataccagtgctttgcagtctatacagctcatacccacctcgcttaccgatgttgcaatgtgccgtatgaatgtgttgttgcagcccaaattgccattaataccgtagcgtatcatgaaaaatgctagtaacactaacatttttcttttgacatactctcttctattgggtgaaatttatgttggtcccatcaaatatgcaagtctcttctcatttagtgggtttcgttccaaaactagtaggacctacatgaattttaacaagtagaaaatagtgttacaaaggaagtgttggtgttttatttgcacttttctttataccactaaaagtcctcaaagcaaatgagttgtgcaccaagtaattgcatagtttgtcaataatgtatgaagtataataaagttcaaccattgaattgttaaataaatgtgcttctctgcccatggatttgtcattacttgaatgtattattactatttagtgtaccaaactcttttttaaggtaatttaaaattattttctgttttgagggtaacgtggcataagtcatcactctttgccaagaaaactcattttcattgccatgaatacttgactacaatgtcttacggagggagaggatatcctctgaggaaagattatcaaattattattaaatatgttgttaattttttggattaatattattttgcatgctcacaaggaacacaatacatttcatttttcttcgtttatgcttttttttcttcataaagcagcacaattttttcaacaaaaaagaatgttgttcataacatattcattttgatcattgatttttttttctttatgcactgaatgcctagtttgcaatggtcaaattgagagggtcatgcaagcacaacacctttcctggtttgtgtctatttgtatttataatagggtctatcttgtacaaatttgcacgagtttaaataggatagaaaaatcttatgcacacttgcacaagtttgccctggttaaacatcattaattattcactttccatcatttttaactaaccgattaattataattttttgaaaaacaactatctctcatgtttattattacatatgactctttaaaatttctttctcttctcataaaaaaaatcttaattttttgtaaagctcctgttaagtaagtattgcatcgtagcaagaaataaatgggtaacgtgattcttaaaacaatgttgttctccagggagaagagaaacaagaaaatgactaagagaaaataagatttccaggccatgttagctaaaaggtaaggaagtaaaagtgtatgaaagattgccacaaccatgctctttttatatgcaaggattacttgtataaaccattcttctataggtggatgtgttgtttggtaattggtatataatatatgttttcttttttgagatgggacggtggaaaatttccatacttggatggactttcaattcatcatgtaatactctttgcacttgtgtcttttaatcaatgcatttttaatttgcctaaaaaaattacgtacattgtgtggtttgagttttccatacttttatcgaccttcaattcatcatgtaatactctttttatctgtagagatggaatacttgaatgcactttatgaatgatctcataaatttgaaaattcatttgcctatatctttatcaacttttatcattaaatcaaagttgagatatgtttataatctttgcatcccattctaatttttatttctagtccattttttggtgtggaggggagacagtaagagaaaatattgttgttgtaagttgcagacgtttgtcccacaacagagagggtcattgccgaagcccataatgttggcgtaacaatcatcgaggtcgccaatttggagatagtcgcaaccgaagcagaagtcctcgatgatgtcgatgtcggtcagggtgagccgctcttggctgaagtagttgtgggtctgggaatcgtccagatagtattggttgtactcgcatggatgtgtgagtgatgaacaacgtggctcatttcctataaccgatttcagttgagtgtactgtggagcttgacattcaacttcctaataagatgaggactccactctattatagtttgcatctttctgcgggtaacaatcaatgcagttgagttttcactgagtccaagttatgttactccctgtgtcataggcaagtgtatggtccttctttggtgtccctatatcaaccaccacaacatagttcaaacttcaaagtattaacaattgaaacacgatagaatggtaattcctcccatcctcattgtcacgcctaaacctggactcgatgtaatctactctgcttgtccagattcagcacatcaatggctaactaagctctcagattaagatgggaacatggcccctctttgtggaccaattccattgatccttttcttttcaaacctgaagcaaaaaattacaaacaattgttataaatttgaatttaaggggataagtttgtgtctagtttgtgatggtcaaattgagaggtcatgcaagcaaaacactttcctggtttgtggctattagtattcatataaagatttttctatcttgtgcaaacttacacgagtttgcacaggttcaacataattaattatctactttccatcacttttaactaacctattaattatgattatttgaaaaacaactatctctcctacttattactacatatgaactctttaaaatttctttatcttcctacaaaaaaaaaattaacattttgtaaagttattattaagcaagttttgtatcgtagcaagaaataaataggtaatgtgatttttaaagatttttttgtcatactattatagaaaatcttttgttgtgcaaaattttgccattttgatctgattgaacgatagtgagattgtcaacacaacaagtgttgtaggtgatatcaccaagaacgacgtcactgagaatgatggttttcaaacactaacttctaacttctccattgcaacccatttctttcccttctttgctactacctttctaacgttgtcattgttagtgatggtgctttcattggtgggagtgattgtagccaatttgtgtccgattgcaatggtggtgaaggggtgcctagtgaagggtacttatgtctttacatgtcttttgggaggggcaggaatcaaaagtccagatttgatttaatggattcaccaaaaacagaacagatttattggaccaaagtacaacgcataatcttttttgtggcaactgttccattgaaataattcttatctcatgctgccacagcatatttatccaaaattattatggtatctatttttccccaagcaaaagaaacacttcttggttatgctggatgttttataattacaacggaaaggataactacaaatattactttggtaaaaaaaaactaaatgttactatcaatacccatgttcttcaagaatacaatttcacccgtaagcaatgttaaaagaaagaacagaaagtaacgggaagaaaacaaaaatgtccacatgactgtcctctcacttctgaccaccagcctcagttggttcaaccacctcagcttctacagtttctggggtatggggccggattaccgtggactggaactgaccaggtgtggaccatttaccagtgagagccatacccatcatctcatatatcttccctccaagttgtgctggattatcaggctgcacaccaacaaacaaccaaaagacacaaagtttaggatttcgcaatggaaacttaaataacattcaataatatggagccatgagtttaccgtaaaaccactggaaaccaaagcagcatcatacaaaagatcaatagctctgagggcatcttcatcgtctggatttgttttaaatgcatcctgaaaattatccatcaagattacgacaccataatttcaatttgtaatcattacaaagaaaagtggggattatctatttatcgtacatccaagttcctgataatagaatggtcagggttgatctcaaacacccttctgctcctcatgaattccaaactggatgcatcacccatagattgtgccttcatcagcctgcagtaagtgtgattaatactgaacattgctactcaaactttcaaaatacataatttaatatcaaagaaaaaagatgacaacctttccatgtttgcagaccaaccaaattttccagacgcaaggacacaaggtgaagagctaagccggtttgaaatttgcacacttgcaactttatctcccaatcgtttcttgatccagtcacatgtttggccaaattcctgcttcatttccttttccttttcctcattcttatcacctgcaaaaagaacaaactatcaacatcaacaacatctttaactcaagctaattggggtcggttgtagatgaacccaatgatagatacaaggaggttttaaaaaaaaaagaagtggaaggggaaggggaggggaaaggagaaataagataaaagaaagaacaaactatacgtaacaaatttgaacattaaacaagaaccaagctacgaattcacaccattgtcaacattaaaattagctcaaaagagagactaacaaatatttggttaacaaaatgcgagtttatgttcaatcaaattattgaaagtttaaagaagaaagaagttaacctagatccaaagtttaaagaagaaagaagttaacctagatccaagtcttccttgctaatgtcaacaaaattcttttccttgtatgatttaagattttgaatagcaacttcatctattggatccaccaaaaacagaacctggaaaattacattacaaaaaacaccaatatatgtatattaatcgatagaactaagtactcaaaagttaaaaaactaaaaaaaaaaagcttatacttcaagatccttctctgcaagtttctccaagaaaggtgtgttctttgcactagtcacactgtcagcagcaatgtaataaatatccttttgatcaggtttcatgttctcaacatattcatccaagctgatcagttcttcatcactttgggatgaggaaaaacgaagcaatggagcaatacgtttgtgattctcacggtcttcaatgcaacccaattttaagtgtttgccgaagttctcccagaacttctcatagtcctgcatacagaacaagtcagtcagtaaaatttaacaggaaaaaaggtcatccttttaaaaagagcttaagagaagttatataagaaagatcaaaagccactgataggatatatataaagttgatatatctataagataaagccacctcaatttatcctagctcctctacaacttaaagaaaaaatgaaagcaaactgtatacagttaacaattttcaaaataattatatacctctttgttctcactcatggatattcccagaatcatgtcaaaagctttacgaacaagacgtttcctcataatccgaaccttcaagcaccacggagtaaaaaaattaagcaagatgaaactggtaaggaattttatgagtgtatcctaaacgagagattcagatgtaaagtgtaagaatatgtgtgttgccctatctacttactatgcggctctcttgaagaatttcccgtgacacattgaggggaaggtcatttgagtcaacaacacctttgacaaagcttaagtatcgggggaactgtttaagcaagcaaaacattagtgaaggataaaattatcagaacaccatccagttattcaaggttgtagatagcaaagtgcttataccagttctccatcaaaatcatctgaaatgaacactctcttcacaaaaagtcttatattcttggtcttgggattgattatgtcatcctttccagagggagcgaaggcaggaacataaagtatagatctaaattctacctcaccctgcaataacaaacatcatccacacatttgtcaataaaaataaccaacacaatattggttgtcaaattaacactatgaatctcctatggacattggagaaaaattgatgttctcaagctatgtttttcagctgaactcaacaaataaaaaaatccactacacacaacaagatggcacttgagacaattaaattcttacctctgtggtaaagtgtgatgatgctaatggctccaggtattcattaaaagttttcttgtagaattcattgtactcctccttagtgacttctttaggattacgaagctgcataaatagagtaatgccacaatcttcaatcgagtaataaattttcaatataattgcaaatcatggaattggaaatcataaaactcacccagattggttgggtgtcatttgtcagctcccaatcccagtaccgctcaactacagttttagttttcttctttttctgtcataacaacgtgtcaaagactcagtcatgagtcaatgagtaaatttgcagaagctacacaatcacactttcacattcaacaaaatacttgattcagcatatatgcagaacaatcagattgtcacctcagtcttatcatcttgatcatcctttttgtcttcagctgtatcgtcgtcaacttccacctggaatgagcccaaaaattaataaaagctcaaaaagtcaaattttacaatctagaagggacgaacttaacttaaaatgaaaataatacggtcatcgatactgctatcaaactgaaaaaatctggattgtagagccatacttctttggtgtatcccttttcctgccatgtgtatattggaaatgagacaaattgtgaatagtttttcacaagcttctcaatccgctctggatgagcaaagcctttgtcgtccttctgaaagatagcgataggcaaaaagaaatcacatttttaattaatctcaggaataaagaaaactaaaaaatatttgatggtcaaaaaaggaaattatcagcatgccttaagatacagtgtaaggcgagttcctcttcgaatcagcttctctggatctgtctcctcagatattgtatacgagctagcatttgcctccccttcccaaacatattgcttatcagattttggactctttgttgagacaaccaccttcaaacaacaaaaaattatataaataccatattaaacaaaaaaatttaagagcatcacatatttacttttacaaaaatgcatacccgatcagaaaccagaaaagcagaataaaatcccacaccaaattgaccaattaagttgttgtcaccaccaacatccttgctatcctttagagccttcaaaaactttgcagttccactttgagcgatagttccaagacaatcaactagttcttgcctagtcataccaatgcctgtatcactgcataaaaaacataagttgcagcaccaactgaaatgacaaacattaatcatattcatagctatttctcttacgtaatactgatgatcccattatccttatcagcttgaattcggatatcaaaatcaactgcgtccttcaacagtccaggctctgttacactcagaaaccgcagcttatccaaagcatcacttgcattgctgcaaatgaaaatgcatagataaatagcttgacaatgcagaatttcataacattcaatcaataccaagacacaggcttctctatttttggatttttcaactatctttttggaaatacttttccttcaattacttgcagcatgtctgcaggaaatcatacatgatacacaacaaccacaacagcgcttaaaaagggtgtagataaatatatttgcaccaattaaacacaaaacaaaaatgctctatcagacaagaaatatgcaaacactactcaagagcaaaagagcatacctgataagctccctaagaaacacttccttgttactatataaactgttaacaatgaggtccatgaggcgactaacctgccatagccaaggatgcatatatattatcgaaagttaagttatgctcatgacactagactagacatgaaatagaatacctcagcttggtactcatatctctcggcggccgctgaggaagaagattctgcagcagttgattcatatcgtttgccaaagaacaaatcccttttcaagtttgaggaatcaattgtggatttatcagagctcataatagaaaaccatctagctgctttggtgtcattttcacccacctgtgactgtgattgtcattcgagaacatcagtaagttacactacataattaattaatgttatctaactgaaaaggaaatggattggtagcggcgaaagaatagtagggattatgatatgaagagtaatttgtaaagcgaagagagaaagaaatgagcaccttagctgctaagtgagaagaggaaatgggagcaagcacgttccggcgaagtgcgccgccaccgtagcgcagcaaggcagagcgagtagtagtagaagaagagagtctctgcatcatattgaattgaattgaactaagagagagagagagagaaactgcgtttgtttgtaagaaaatatggtagtagggttttagaaggggtttgcttgcttcgatcgaaaaatggcgttttggaagcttctcgatgcagctcgtttccacacttccctcaacaatatatttcccgtttcggtttattttcttttttcatgcctcgtttcttttttacttaatttgtacgactattataatttgtttatcctccttctaagtatataagtgttcggaattctttattgtaattcaatatatttttcattttcataaaattaaaatatattttttaactcaagtaagtttagataaatttaaacttataaaaaatattatattttatatcaattatatatataatcaacataaaagatattaaattgttatattaattatatatatgtaaaaatttatcatcctaagtttgaatttatttgaatctatattatataaaaaataatacattttaattttatgaaaatgaaaaacgtattataaattttacaaaaataaattttaaacatttttcatattcaatgaataccaaaaatatattttagcataataataataatatttataaattacatttttaatcaaaactttgattgcgatcatattcttgtctcttgagagttgagaccaattttctttcaaaataaataaaacaaagattggaaaagaacatctcattgataaatgaccatggtgggagaaaggaggctttcgcaatggcccaggagtccaggcccgttagcattcagccaggcccgttgtcctgtcggttatatgtcaagcagacaaaacttggttgggtggtggatggagtctatgattattgaattggaggcataagtttttcaataaaagttcgaagaaataataaaattagaaaaaagaggcaccaacaatacttagtgtacagtaaaaaatcgaaagagtgaaactcaaatattgtatatgtataaatgtataatgcatagagttgaaccaaaattggaattgcgaatcttatataaactattttagtgtaaaaggcttgcttcctatcatacttaagaatgtaaaataatccaaatgtattgagattgtttttttacaaacatttagtataacagaaaaacaagccaatttgaaaggctatcattggtaggcggacaagtaagcatcccagtgtgattggggagagaataaggtaggcgctgtgaatcaggctattcgtggatatattgaattgttaacatagatctattaagagaatcagagaattactgcacaaccttaaatcacatacaattttattcaatcgtaattattcaactagatcctcaacgtctaagaattttcttaagagttgtccactaagcaaagttttcaatagttttagagaaatatctttggtgcacataaaaagattaattaatgatttatttgtagatatttactcaattcttgtaattgattgtacttaatgaaaaaaaattactgttagtgatgtatcttaaattttgaaaaatgtttaaatacttatgaataaatatcagaatttagttgttatttttaaattcaaaatattgccaaatatttttttaagaattataaatataataagatatcatcagtatggcatgtcatatagcttctacctttttaatttctgaagaatatattaagaaatatataagtccaactaaagccaccttgggatactgccaaataaataaagagcacaatataattgtcgtgtttgtatgtctcaacgcacgtgtttagacataattataagtaggtgatttgatattggagtagagcatgataatttcatatttctacaaaatttatttaaaaaaaatgattttgatcagtatagcaatcataagtaaaaaaaactaattgcaagtttggaaatgactacttttgaggaaataattactgcacctattttagttttctcgatgaaaataaatactatttctttaaaataagttaaactaaatacatataatttattactgattttttaaaacaatttaaaagctttaaactttaataaatatacaataaaaatgtttaatgccttttagctgtcttaaaaacatttatttttgttttcaatgaaatgcaaaataatattggattaatgtgaatggatcaaattttcaatcttatgcaaaaaagaaaaattatatcagtatatcactaaatcacagttcatatatgcgtgtatgttactttaggtagtacttttttgtaataaaagtattaaattaaattatacgccgataagattattttaatttatatcaatttgtcacttgataataacttacatacgagtttatgtaactttggtactacccttttcttctctaaaataagagaatacaaattaaattacagtagtattaaacatccaagatatcaaataccaatttaatatttgaagagaacacgattctgtgaaataaagtccagctacaattgagttacgttcattactgccttcttgacatcgatcaagccactgcaaagtactgtattctggcctataaatatgccgagttatttttgtttaggaaaggtcatatacaattactaatgtcatatgtcattcacataccttcaagggggaaaaagaaaagcatcactgatacaaatcctccttgattattgatacaaaatgatggagatcgaacagagggttattatgcatctattatacaaggtactagctggggaagcaaattaagacaaacagtagtaaatatatttacagatgaagggaagtatcaacgtctgaggtatcaaaatttcttgatgttgatgctccctgtggccataaattggaggatggaggtggtttcgtgttcatggtgttgtgatgaccaccttgtttgtttgtggagttgaggccaagagaaagagagtcatggagggttggcctatgtggagccaccaaccttggttgttgttgagagttttgtgatgatgaggaggtggtctcagatgacaagagtttaagaagttgtttcccctctcttctttctttcaccttctccaactgtctaaacctttcttgaagaagagcaatggaggagttcacagtggtaggactaggatcattaccttgcctacccatttggcagtgagtaaaattttcaatcaggtgtcttctttatattttggtggggtttggcatgtagtggtttggaagtgcatgtataggagataatcatttttagctgttcatcgtttattttattcatttggctccttattgattcctgatgatagcaacagagattagaatcgactgctgttggagaacatgccaaatagataattgctaaaagttagtataggggaaagcagggtcgctggatgtgtggccaaagggactttttgaaggaggaaaagggtgagaggtagagtccaaattgatgatgctgagtagcatttggaagggagtattgtggagaataaatggttaggtaatgcaatgcttatctgggaggagatggtacttctttgtttgatcttgctggtataatacccctcctttttaataagcattaactgttgaatgcactattcttgttttggagctggagggagagtgtggtgctgtgcacaagagacaaaaggaatagagaaggaatatttttggagtttgccatcaatgattaaattagtcctaatgtagtgtccatgaaggaaagacagacaactcaatctacggtgtaagcatatgttttgtttaacgatacactctagctacttttaaattctagttatagttgtaataaatttccatatttttccttgtggattttgggttgatacaaagccataaagcttagttttgtgaaatgttaacctggcaagttgctaaattcatgtctcatttttttcatctataacctgtaactgtaacttggtagccttcatacaagtttgtgtttggaacgaatttgattgtttcttgaccaaatgctggattgttcaccattcttctaattaacattgagtctttaggaaaggaaaaatttgaatattgggttgtgaatgggttcagtggagctaacaatgtatatccatgatgggattatctttaaagatgagatattttttgcaattttaatggttgtggtcttgtggagtatcaattggttatatgcaccaagttgtggtctttgaattgatttgtgttttgttaaatgattttaaatgggttttgatttgacttgtaaacttggaagaaatgagtaggttaagtgttagaagacaagccatgcaatgattgtttctcttacaattgagtaccaattaaagaatgagtaagaatatggctagtttagttggatggtaaagttggatataaaatttcatcacatatcttaagaatacatgcttatatatgcttatatgcttaatcaattcagtgaaatattaacggttacggttagttattcgaataaacattaaattgtaagaaaataaataataaaaatgaggagtaacttttttactctttaaactagaacactaaatccgtgcaaagcatcatgtaagataagagtctcagtcacacaatataaaataataaaaataaaattagagaaaaaaaatctagagcttttataccatgtaatatactatgtaagggagaaacaaattttactattttacctaaattttcttgagtaagtttttcagtcaacaaaatgatctatatgagtgtgtttgggatagcggcacaaattaaatcatttcaataatcaattataatcataatcaatttttgtttagataagtttgttgaaaggtgattttcagataagtaattataagattaatttggtaattaagaaagaaagaggagaggaaaaaaatcgtggatttgaattctttcattaacaaaaattaacaaattactcccttcatctcaaaaagacttatatttgaagtattttcatacatatcaataaagtaagtatttcaagaaaattaatatatattatgagataattttactaaaatatcattgttttttctctaaatttcaataaatgtattattaaatttttcaaaacagtattatttattacaagacaaaattggaatagatatttgagtatctccttgaaaaatgaaagcatcaattaatttgaaatttttttaaaggctacgaagggagtaataactaacattgaccttaaaaaaagtgattttaagataattataataaaaaccgattacaaagatactccagagatacattgaactcagctaaacacaataactaggcatgttggtagaaaagtaccaatcattaaatgctctcctatttccaacaaaaaggtacagtaacgggtttttaaattgttgccgggtcgttgatcacacccaggaaatcatctttcatgcagaactgcaaaaaaaaaaaaaaaaaaaaaaaggttatgcattatatcagttaaatgagttctaaaaacattgaaactgaaaatcagataaatattcaatatccaaaggaaaaagtaatttgtatctctttatttgtcattttaaaaacatgacagtgtcacagttcatatctatagtcaatacaaccaaacggaaggataacataggctaagcatgttcaggagtatttaaactttattagcatacaaactagtatcatatgctcgctaaaacttccattaggctacaaggccatagacaagtgttcttttaagacatgttcacacatggcatacaacaataatcttggcaggaacaatacagtcaaacatgtaacatcaacaatgtggtaaacataatatcattctcattgcatgcagtaactggagaatttgtgatcacaattttctcacaacttttgtgagtcaaaacgttcaagattttagaaatgaagtaaagctgcaccatggaatagtaatcattcttgcataccacaaaagcacacggtaaatttataactccctcagggtagcaaataactttgcttggtagtaaccctaatattccatgtggataacttttgaaatggataaaatttaaatagtgataaaagagttaccaacacagtaaattactagctaacggagcataaactagcattcctcaaatttctttactattataaattcctccacaaatttcatgatatgcacaaatactagggcgaagccagtgatcatgagctaaatattaaaattagcaaaaattaaaaggctcttctgggaggaatttataatagtaaagaaatttgtggagaaacaaaagctatatttgccactgagctaaaaatgctttcctattcattcaaatttctcaaagcagaatttagcatatagctaggagttataaggttgacttgtaggtgaagggagaagggagaggtggtgggttcaaatccctcccactaacattctaacaaaactaacaactaacatttgcctatataaaaaaatagaagaagcataaattaagctaatggagcttaacaacattcaacaaaatgaagagacataatatatatagaagtacaatttcagtagcatccactggagtcccgattatctttagtctcacttcagtatctttttgaatcttaacttgcaaaagaccaattgattagtagtaaaaattatcataaaataaaaaaaaaaaaaacaagacaaaaaaaaaaaaacaatttgctctcttcttttccattgaggaagttataattgagatatactgatccatctgaagtagtgtaatttggcatgtctccagactggaactccatatcacccggaatcaactaagtggggcaaaaagggtcataacaaacaaaaatatatataaaggtaaaagtacaactacaagttgaaaattttccattgcaaagtaatggcatattctatcttaaattaatttaaaaaaaaaaggaacagaaaataatcctcggtaattctaaacattaccaatacaaggaataattggctgacaatgatcatcttttaaaaaacaaacaatacaaggaatttttcctgtgtttatgaaaactggaatcatgcaccgcctttttctatttggccaatctcaaatttgcacaatcatctctattctggccccaaaactgttacattaaatagttacagaagtccattacataattaagtttcgagctgaataattcatttcatggtcaagatcttcacgctaataaaagtcatttatcttggaaaagaaatcagataggcataaccttaacccatgctgtatgggtacaaatacaggtatatgataaggatacatcccatataacaatacataataataaataaatatatatatttaaatgaatttatctacatgtggtcatcctatcctagcccaaaatcctgtcattcccactctcccaagcccctatgtgataatttggaggaatggaggctcccaagcccaaaataatcatgtaacccaaaacctcatttataatattttgacagagtaaaaaacttgcattgcattccaatagcaacaataataaataacaaacataatattggctttcaaaattgaaaacttgcctagcattccaatgacaggaacaataaaggaaaaaaaattaatattcaaaatgaagaacaatagtaacaatcttttagatatataacatggagataatagagaccacttctcaaatattacaaaagacaaaaacttacgtggtttgaaacaatgatttggacaggtccagcttcagcaaaaaatcccatctacacaaaaagaactcaacagtcataaaccaaaatctccagaagttagagttacacagattgattactctaaagagaaaggaactgtataaaccttgttcaccatggtaacaacagcttctatgttttctatcacgaattaagcctggaaatggtctgaagacaacacattggtacttaattggaaatgtcacaaaccctgttccatcacaaattaagccttttcctattttttctatccctgtaaccgccaccacaaatccatgtctaccactgcataataattgaaaatccaaatgttacatccatctaaggtccaaatcagtcacttaaggataaatacttttctctgatctaaattatgtacggtccaaacaaatgcacaagaaaaattactcttattaacatgtattactgggtagtgggtaaaaatcaaaggctcatgccagagggcaaggatgagatgaagggttcttaactcagagggaattgagtccttgttacttgaggttggggtattgtgattattttggtgttactttattgcaattgcagatgtttctatcttgaggtggcctttcaagtgtacttttatttcatgcttcattgtttctttaagtttaacaagagagagaaacccaagacaaagttagcacttattcattgggtaactgtctgctaactttcacaacttcaagcatcttgaaaagcttatcattgtcaaaggactcaagttaagttcagggagtgtataagagaaatagtatggttaactgattaactcgcatatttcatcttctttcccattttagcacaactcattttctagtgggaaaaaaaaatattgaaaggatcttaaggggaatcacctgcaagtgccttccacatctttcattagtttggaaataagattatcacgaaggttacaaccaaagtagcgtggatgcagctgcatctttcgctccagcactatgtggaaaaacattttcgtgtttcttcttgtcgctcccttcttgcccaatctggaaagctagttacttactactggccaaaaaacacagaataagaatagatttggaaaatacaattaaaaaagctcaaatgcatgtattagaatgggaagtaatgcatcactaatttttattacaaaaagtaatattaccacatacaattacgcagaacccactagggtcggcctagtggtaagggattggaatagtgtgcatgagatcataggtttgaatatcagtgccatcattatagacacacaacaacaaaaatatacaattacgcatataaaactgacaaatggaaaatccaatgaaagttatgttcaatattcctgattgcactgcgaaacaaagattgttacactaaatgccagcaacagaacactgaacaaaaaaaaaaaaaaaaaaaaaagccttttaagactctgctcaagcaaacaagcactctggatccaaaatgaaggacaaaaaaatttcaagctttggcacacaaacaagaataaccggaagagaatgcacatttgtgatgatgagcagttacagtgaacaagaagcagaatccagaagagaagccataataattttcaaaggaatgagatgtttagctatgttcacactctcacgtccacgcagaaaagtgaaaacggtaaacttcaatttgagtcacccttcccgaacctcgagtataatccctaaatcccacacaaattgtaacttattaatttattcaattattaattatatttatatttaacagaaatttaatttattactaaattaacattctttttttgtaaaattaaaacaatcaacattgaataaataatccttactgattatttttcttttttatttagcatgataacagaagggtatttaaattagattactacaatagataattcactagggtcaacttataatgaaagggtcattaagtttaagtagtttgcaagacagtttaggttcaaactttatttttgtgtacaccaaaacatatcgctgcaacccagaacttttaatttgttgctttacattctcattggttccgataaaaaaaaaattaaaaaaagaaggttagtattgagaaagaaattggtgtaaaaaaataagtaattcatgatttgatttcacaaaaaatgggagattaaaaaaatctaaaatcgtatactatttgcattctttccaaatgagtaaaaagaaagtggtaagcaagagtatgttgttttcttgttttcaaatcatagcttttgcattactcccttccccttcatcacttctttgttttttaattttctcatgactgactacattattgacgcatttagatggatacattgaatgcccgcctgctctttctcttgttctgggctttggatgttgttggtaatggaagatggattcattcgtttatggttttaatcatggttttgaattggatggtgtacaaggcacgtacatcactaatagatagattccttgaacatggtttcaatgtttgaactaattaacatatagggaaaggtggttcctgttatgggaagatagaaaacaatatgtaaaaacacaaaccaatcaatattctgaattccaaacgtaagagttgatattttctggggacccaaatttctaatatataaaaatataatggttctcatacagattcttctgctacacaggtgtagttacattagtgaaaatggagttaaacacaagggaactgcaaaagggagcagaagattgcatggaatgttggcatcctcattgtccagggacaaagttagtggcataagcccaagcattgttggcaacaggatcagcaacgtggtcgtaaaggttctgaatagggcccttgccagtgacaatagcctgaacaaagaaaccaaacatggagaacatagccaagcgaccgttcttgagttccttgaccttcaactcagcgaatgcatcagggtcatcagccagaccaagagggtcaaatgcaccaccagggtagatagggtctagtccttcaccaagtggtcctccaccaactctgtaaccttcaacaaaccccatgagcacaacctgaacagcccagattgcaaggatgctctgagcatggataaggtttgggttgcccaagtagtcaagtcctccctctgagaagatctgtgaaccggccttgaaccacacggcctcgccgaatttgacaccattcttctcaaggatctctgggaaggtgcagccaagggcaccaagcattgcccatctgctgtgaatcacctccagctcccggttcctggcgaaggtttccgggtcagctgataatccagcagtgtcccatccgtagtcaccagggaattctcctgtcaggtatgatggaatctgctctgagaatggacccaagtacttgggacggtcagggccatacctgttttgtttttcacaacacctcatccaaagtcagttacattctcagacaaattgataaaacctagcttcatatgtgttagttagctgatgttttttttttttttttttttttatctttataagacaagacaataactattattaatctgttatgcttacataatcactggctttctagttagccccatcctgctgagaattgttaagtacaaaacatagatatagttctatagatgcttttttggagttttacctcattgataatcttaacatataatgcgaacttttgttacatgaattagtgagttaaaactccagttttaattccctccatttcaaattaatagtcgtctaaagattcttttagatataccaggataaaataataaatagataaaaattaaaatgacaattattatagaataattttttttctcgtacactataattataatgggacggaagaagtagaacagaataccaaaaacaaaaggtattgcatctaagttttgcggaattactagtattaatttatgttgtcaagcgagtattatattaaaacatgtaatactaagttgaactagtggagtgggaagggtaatgttgagttaccaaatgctctgaggagcactcttgacggtgcggcgcatgttagtgcgacctttgccggcgccaccggtcttgcggacgaactcattgacctgcttgagagcagtttgaccagcgaatgctgattgctgaatagcagaggtggccatgatggttgtgttggctaaggctttttttctttggttttgttttgtgttgtggagaatgaagaaggctactacaaaggtttatagaagatcgtatgatattgtggatcaggatatgcacaactcagcaacacctcattggtcgtggatttggatgtggattctcatgctgatatttcgacatgctatagtggctcttcttctgccacgtggatgcaaagatctccttcctcagatgttttcgagagggtcgatgtaagccacagaattcaggtccaacaaagtcaagaaatttaaattaaaacttggaaattggtatggaagatagtttggattgggctgatgctacagtaacagtgcaaacccgtgagtgactcattacattttttttcttctttctttttttatttttgaaaaaatgaaaaaatttgtgttgctagtaaaaccacacagaaacacagggctagtagtgcctcgacctcaagaacacaatgtggcagctcatcttcgctacattacaaatttggtttcatgtggaaattatatcttaggattttagaagagataatgacctctttaatttggtgtcaaaatcggtctcttcaagcaaacagtttaaaaaattagtatgaaaaatcacgaatgaataaactgtacatggttaaaaagtcgttgaaaatagaaaaaccacatttgaaatacaaaatttataactattaacttttaaaaattatatctaaaatgtgaaaaaacccatctaaaatgtgaaaccaaacatactactagaagttttagattaaatttcaggacggtattggttttttaattaaccctcaatatcataatcaagaaaatttgtatttaaatgagaattacggtaattaagaaaaaacaaaataaagcagcttaactgaggttaatgttctatttaaatattcaatcacaaaaaattaagaaaaataaatatggtttaaatgaacaactgacataattaatagaaaaaattgatcataaaatattttattcatttttaaaaaaaaatatatatgtatatatatatatatatatatatattacttatatacaatatttcttaattatattactattataaattaaaaaatagaaagatattgaattttagattaaggcctcgattttataataatttcattaatcttatttattgtcacatacatgacaatttcctaaacataaagtgtcttgttgttatagattcaattttattatataaattctacacgtggtaacatgtccactatcgcattttataatatgtaactatttataattttaagttatcttttaaatagttaatatgtcgtcatgtatagcattgaccacgacaagagttcatatataaaaacacagttctttaatagatgatatttttcacagaaagtgtgaatgaagtttcattgaaacattttcaaagctcaaaatataaataatttatccactaatgatcaaacttcaaagctaaaggagtgcagttcatacttataaaaatcaacatcatcccgaacaccatctgaaaacacacttgcctgcatcatatataaaagtaattaattagcatatctgaaaggagttctgcaattactttttttttaccatatatggaatcatgaaaaacgaagctaataggtaacttcggcttacttgaaagctttcgggggatgtaagtttatttgaatttgtactctaaggcttcactttagccaagaaagtctaaactaatttagtttatcttttcattttctttatcttcatttgctatttaatttaatcttttgcctttaaaaaaaataactttttttttgttctaatcttttatcttttttcgttgtttctaaagtaagcttttatctatttcattctcgttgggtatatatatttttaaattttctctgatatttaacatgcatatgaaatttgcttaattggtttctttatttttaaattttcacttatattaaacatgcatatatagtttctactttttccatcttcggagacatgcaaaaaagttttaaagagagtatataaaagaagaaaaataagtccaactgagctacaaaattcatacggctaagctaaatgattcactttctacgttattattatcacaagactttttataaagcaaacttgacaagtgatgcaaaggatgggaattgagttatggagacattgacagaaacaagttctactgaaaatatatacaataatagattagaaacgctaacgttcacattaattctctgtagggaagtgatggggaatcaatgaagcttatctacattcggtagtacaagcaaatgattattctacaatgactacaaagaaaggaactgccacaaatgaatacatacattaacattacatatgcagcaacattatttatacactgactaaagtcgttgggcgtgtcaagttgatctgcctgctctaacgaattgtcatgttcatgcctatttgactaaaaattagtcctacagggaacagaatgaacatcagaattggaaatactggagaaagatagaacgaaggtgaagtaattgattctgaagcaatgttggtgctgggattgagaataactggaagaatattcttcaaggtccattcaaatacgcatgcaagagcaccaatcaagacgcagataccccatctcgtagcattcagctgcatgcaatctgctaggcctttagcatactcaatcaccagcacttgcataagaaaacaaccaactaaggccaccaagaaatagaagctctgaacaaccatcttcagaacctggttgttgagaaaattgcagagttggcaaaataggaatgtgttgaagatcatggtttccctaacctttttatccttgccagtaacatgtccaccgaactcaagtatcattgacacagaagtctgatataaaacctgaataacaatgtttttccagatttctttggttataatatgttggttcctataatcagatggttgtttagcaatccgttcctcgccggttagcctcaataccatcattaggccacccagaatgcacatcaagacattcacccaaatcaactgggatgctgcaaggggggaatctccagtacatgttgtaatcaaggttatgactgaccctgatatggtacatgtcagctgaagttgaatgaacttctgaatattgtggtattgacttctgccagccatcacaattggttccaatacactgaaaaatttgattgttatgtcacaactatctatatccactattgttctcagaggatcaagaactatccccacatcagctacctttagaactgaagtatgattagtcatcaaccttgttccaatgaatgcaaccaccttacctttctcttgcaagcactgtatcatgagaagtttgtctttaggatggaagcttcccattacatgggctcgatccactttgtctaatctagcttccccattcaaatcccgaagctcttttccttcaagcacattatcatgttctagtcctagtccacaagctatgcctttcacttccatgatgccatcctccgagaccagtttgatctgtatatttgcatcattttttttcagattttccaaagctgattttatggattctagactagtagtgcatttgagacctatcagtcctaacaagatcagttcttctttctcaagttcttctccatctgtttgtctataagcaaaagcaattggctcaaggccaccatcctccatctcttcaatcacctgcccaaatttgatcttttggttttccatggcatggcattcccctatactatcatagtacagtgaacacatatccaatattgtggatgcagctccactccagtgcatgtacagaacttgttcattgtccccaatttttcttaccaaaactccgctaccttctttgccagaattcagattgctgtgcttaagaatgtcaaatttctcttctgtgaaagatctcaagttcacttccaatgttgtttttgcccaagaaacaagtgaattagacaaagaggaaagagaaatctctggtgcaaggactgataaaccaactccttgtttaagcatgtcaagcgcagttttatctatttccgatccctcaaccatgctgacatctttctcccccatccatactctgctaacctccattggtttagatatgagctcacctgatacatcaatgcagatgacagttaccaaccccattgtcgtactagctgataaatcatttagaacagcatcttggtttggaactaccttatccatctggtacttgagagaaattgtaaccacaagtggcattccatgctgcacgcatagtattgcaacagtgacaaggcgtgttaaagtggaaaccgttccttggggtctcaagaaagctctctgaagtgccttcatcaacaagccaattgagaccttccccttcatttctggcaacccactattgttcccatcttttccacatattaggcgaacgaagaccacaagtaaaaccagtagagagataaaaagagcagctatgtcaacgtaagaaattggcttctcgattagttgctcaaacaagcccctcctttcagccaaattggtgttggttccaactgatgttaccaccatccttccctggcccccaatcacctttgaaccagatataagaaacgggttccccttaggatcatgtttgctttttgttgcctcaggctcagccagcataaggatgccatcacttacaagcaaaccgtctgctggaacctcatcacctggccacaggcatactctgtcaccaaccacaatattagatatgggaaccattacgatctcttcacctctcttaaccctgaattgcaactcgacctttgtctttgccaatttcaacattttcctctcacgccaaaagtttgctactgaatttactacaaccagtagtaaagcagcaaaaactatagcaacaccatcatgccaaccatgtttgggtccctcctgcttgaatcctatggcgaatgacaacccagcggagacgaacagcaccaaaattgtgcagcggtagaacttgcagctgttgaaaaaaaatttggacaagtttgttccaagaactggtaatggtatagtggtcttgccctgttcataaaaacaaaatcccatcaacaaaacacatctatctcaacccaccacaaacaacagttagtagatccatccttcttcacacttcaataaaccgagaaatttgatggtttaaactagaagggatcctccaaatatcataaccaccatgtggatgaaaaaacaaaagaatcactccctctttaatgtttttccatgtagtataggagtttagcaagaagttgttggtccgaatggaactgagctcagattccttaaacaagatctcgaattcgagttttgtggatgaaaaaacataattgagagaagatatctcactaaaagtgatcagtcaggttcttttgtagaaattaatcatcagctaagttggtgaatcacacctataacatgataacccaagtttcattatttttctttgtttttattgttgaagaaaagggcatgaatatgaggaggggagaaggttgatatatacctttgagtattgatgttgacgaccaaggacagcggaaacggagtcaacgccaccaagctcattgagggatttcaagtccttctcctttacaattcgagcaatatcactcctaatgtgctcttctctttcttcttcttcttctatatcaattgcaactgaagatttggaagaggaggttctagcaggaggtactgaagtgtacggtactgaagaaagtagtgatcgtggcgactcatgtttgtcggtagaagttgttgacttcttgactgagatgaggaatcttatgtataaacttctacgccatattctggtgtacttgctgttgccggtggtggtgaggagtaaggtagcaccaagttcaatgttggcaccaccatcaccaccaccagctgaggacgaggttgcttgggacatgtcttaaatatgtcacagttaatgagattggtttattgataaaaagaaaaggaagaaaaagaaaggtgacacttaattcgttatttggacacaatggttgattggactgtaattcaaccggaacaaagcctacgtttcttgttctcaagatccaactagagggttttcagacactcatatcatcttgcaattacacacacaaacacacacgtggtttaaacaaggaattatgttacacatgatggggttatgttacaacacggaacaagtgtcaaagacagacactatagagaaaggttagtgattgctcaaattagattttgatgatttcaagccaacaaagaatggtcaatttatagcgtccaacttggatcacgtagcaaatataataaaactcaagggtatcgctgctattaaatgagtttttatcatggatcaatgggaatctgccacgattccaaggcataaacgcgtacgtagcagggtggagaaaaagtggtttgcccttgcccttgcccattatacgcaaatttttatgttcaatcttttatcggccacatgccggcaacccccacccatttggaaattataaggcaatttactattaccaaatttcttcttcacacgtcatttgcatggtttctagaattctttcacgatacattgcacgcccaaaatagaataaacaatatttcttttttcattatgacgttggtgttgtgaatttttttttttctgattacctttttttttcatttataagaataaaattttactttaaaaacgaaatctaatttcactcaaatcaataagttgttagtaaaataaataatatatacatcaatggtgtgtaaaattttttcggattgttatttaatcacaaaatattatcttcacaaaaaaaatcacaaagtagtattatatataataaatttgttgaatttttatgataattatttttaaaatcatattaaagatgatttataattaattgatagtgttcaaatttatacacaacaaatgttttaaggaaattattttaggttttattttgtcggaaattaaacatgcgtggaatttcaaagttaaggatatattaaattatataggactccatgtcatggaattaatttttttcttaaatatgcctaagaaaaaactacaaactgttaaattaaaaaaaaaaagccctaggaatttgatttactaaattgatattttgaaccgtaaatgaaaaggaaaatgaataatggttttggtttttgaaaatttaatacaccatttctaatttatcattacatatttattagggtataaataagtgcggttcactcataaatttaaattgacccaaatcaatccaaagaatttgggttgaataatttttgtatttaaatcagactcaatatcaaactagtcaaattttggattggatcaagaattttaatatttaaactcgttgacatgttaattgattgatttgagttgatttttttttttaaaaaaatcaatcaatatcaagtcatttaaatttgatttgatcgctttacatcatttgaaatttttttctttaacctactaaattttcgtttgtgatttaaatccgtaaataacttcttgactaaacctttgatgccagcttcaacatgtcattagcatcatgtcaggtattattaagaatacctcctcgttctaccattttacatataaaaaaatgataaaattttatgaacgtagtacttgtccaatcggcatttaaaaaattatatataataataataacaacaataacaatatgggaagaaaaaaaaaagacataaaatttattataatataaaatatatgaggtcatcatcatgtagtaacaaagattttcactattaaattctaacacgtatgtgagcgtagattgttttcttatatttagtactttagttttcagttaatttaatattctagataatgatttatgtaataagtcaaatctgcaatggaaaaaagcatgctggcctctatacgttttggactattcgatctcatttctcagccttctctcaatctaagataaatacaaaatttattaaaaattacaaaattaatagtgaaattcattgaatataaagggaaacctacaaatttttatgattttcaatgctaatctttctcccaatcccgaatgagaaggtagattgaaagttctttacttttctttttttattatgtatgctttttggaacagtaatgacataccaacattatattattttaaatattttattaatatttatattttgtttatttctttttatcatatctcctattaattatatatatatatatatattaaatgtcttcaaatgtcaaatagattcgtgctattcacatttttgtttgttaaaaaatcatttttgttttgggaatagggagccgtttcttatgcattatgaattagggcatgtttgcattaacttctccaaaagtatttattagagatgcaatgaaagaaaaaaaaaaaaaaaaaaaaagcttttccatgacattgtgaataggtccacccctaaattttaatttcatgagataattaaaatttattttataaatttaattattattaaatttatgtcaaatgtatttaatttgtgttttcctatttcttttcttgtgattttgttctttctattttaaaaaatccataattttgttcacttcttaattttatatagatttttttacactttaattaattggattttttttatgatatcttaaataaatatgttaaatcttggactcaaatagatcaaaataaaagaaataacacatgcaaaattaagaattgaaccaaaatcatatattttctaaaatagaaaaacaaaaaaaaaaaaaagaaccaaaattgtaaatcaataattaaagtggaaccaagattacaatttaatctaataacaacaataaagatggataaaaagaagtagagattatatacatatatgagattatcaagtaacacgtttgttgcttccttatctttactaatttagttttagtttatttaatattctagataatgatctatgaaataagtcaaatctggaatggacatcaaaagcttgctattcttctaaaaaaataatcaaaagcttgcaatagtgctggcctatacgcgtttggactattctccgttacgtctcaatccaagttaagtgtcagttctagcttacacactctaataaataattgctatatgatcgaagtgcttggcattgctttcttttgaaacatcctttaaattgctgcattctccaattctcatctaacttcatttctcttggaattttgcttgaagaaataagagttttgttttcttggcaacatgttatgggatgataattgcacttatggagtcaaataagtacgttttaagaataaatgtttaaattatatcgatctcataagtattattatacaaaatctcatcaatcaaatcgtttttttctaaaaaatatgagacatctaagtcatccaaataaaacaatctatttcttgataagaaaaataaaaaaaaaaaatgtgaatggtgattgaattgatgataaaatagaattttgtgaagttcctggttatcctaaatggcaactgactggattctatggttatcatgaacgtgatagaagataagactcatggaatcttctatgtgctattgcacatacttgagtgattggtgcatttttggagatttcaatgatctactttcaaatgaaaaatatggtatcaataatcatcaaaattgactttttagaggattcaaagagattatcattgattacaatctccatgacctttctatagaaggttatacctatacatgggctagaagaagaggaaagcatgatactattgaagaaaagttggacatagcacttgcaactgggcaatggattgataatttccccaattttaggctgctcaacacaatatcctcaaagtctggtcattctccaatcctactgaggcttcatggcaaaaattctaacatttttggagaagatttagatttgaaaatcaatggtcgatggacccaaattttcaatatttggttgaaaatagttggacaatctctttgtccaatgattttcttactaaattgaaggcatgcatagaagatacgaataatagggggaagcaattgcgcctaaaatatcgtgctcaaattgataaatcaccaggaacatatggccttaagccaacattcttcaaaagattttggcatctccttggacctaaagtgcataaagttgcctattcttggttataacaaggtacattccctccacaaccattcttttcatcccaaaatgtccaaaccctaccaccatgaaatattctagaccaatcaccctttgcaatgtcctttacaaaataatttcaaaaatcttagccaataaactgaacccaatccttccaaaatgcatctctcttgaacaagctgcttttgtataaaacaaatttataattgacaatgtcctgctagccttagaaattatccaccacatgaaatgtaagactcaaggaaaagtggggacgtagctttgaaaattgacattagcaaaatgggatttcatgaaaaatggattggttggatgaatctttgtctcacaactgtgcaatattcaatcttggtaaatgagaatcctattggaccaataactattgggagaggactaagacaggtgactctctatcgccctatctcttcatactttgtactgagagtctttctagtctaattaaaaaatatgagagaacaggagatattgatggtgttaaggtgtgcaaggtgctcctaccttttcacaccttttatttgcttatgattgttttctgttttgcaagactcaagaaaatgagattaatactttgaaacatatcttggacacttatggagaagacttagggcaattaatcaatttccataaatcaggagttctctttagctcaaacaccttagataaatgcaagcaacaaatcttagtcacttgggtacaacaaagtttaggagctgaaaaatacctgggtctaccatcaattgtgggacggaggaagaaagaagtatttggttttctaaaggaaaaaatgtggaaaaggatcaatcactggacaagcaagaaattgtcaaagacgagtaaggaaattctaatcaaatcttgtgcacaagcaattttatcttactgcatgagtgtatttcttcttccctcttcactagaagatgaattgcaaaaaatgatgaactagttttggtggggtaccaaaaacaatatgcagaggagtatcaattggatgagttgggacatattaacgattaaaaaagaaaatgggggaatgggtttcagaagtctccatgctttcaatttatctatgctaagaaagcaagtttggaaatttatttcattccaagatgttattgttacaaaagttttcaaagccaaatactttcaagattgtttttctggatgccaaacttgagcataatcctagttttgtctggcgtggtatctttgcttcacagagtgagataaaagagggtatcaaatggagaattggaaatggaaactaaatggctatttggaaactaccatggcttcgaagaaatgactacccatatgtttctacggctcaaccccaaggattagaagatatgcatgttggttctctaatagatcatcaaagatgttcatggcaagaagacttcatggtggaagtcttcaatgaagttgacttgtaggaaattagaagcataccacttcttcacgtgctagaggaagacctgcgagtttggaaattcatgccacatgaagaatattttgtttgcactgcatacaccatgccatatggagctttggagaatgaaagttcctcctaaatttaagcatttaatctggagaattctgaggaattgcctcccttcacaaagtagattgagagataaaagagttctttgtccactcacatgtgaattttgtgaaaacaacattgagtcaagtcggcatatcttctttggatgtgattcagcaattgcaacttggcaagaagcaaaactttggcccattattcagagcaaagttttgtctgtagaaggtattgtccctctcatttttgacatcatcaactttctacatgaaaaggacccatgcaaaaaatttgctactgcactatggcgtatttggaagcaacgaaatgataaaatttggaggaatcaggtccagccaacatagatcacgattcaacaagcatttcaacaacttgaagaatggaagcatgcaagacagcagcaatcccagtcacatgtaatgcagattttaaacaatcaatgtgagtggaagaaaccatcttttggatacttgaagtgtaacattgatgcaacaattttcaatcaagatcaacagtttgggaatggaatgtgttttagagatcacaatgggcaatttattcaagcaaaaacaacatggtttcaaggtgttccagacccaatagtagttgaagcattcggctcataccaagccagggaatggttaaaggagagcaacaacaacaataatttttgtgttggacaacaggcttgtggttgatggtttcaacaataacaacaaaggtttatcatatttagcttcaattctcagtaagtgacagttctaattacagatcgtttgatgacaggtggaaggcgtcactccaacaatggaagataagccaaaggaagatgccacaagggtgatgggcaacccctaatgagtctaaacgggttcagcatgaaacctaaataacattctcataatacataattaattgtctggaaattcaagtttgtccattctattgcaattttgtgtacatacaggcaatcaacctttaattattctaaatgcgcaccattaacgtcaattatgaaggctttaatttctagtggtgcacatgaaaagacatcaaggctatcaactactaaaataaataaaaaaacgaaaaataaaagaagtataactttatttaattctaaaaaaagagtcaacaacaccctccatctcatgagtctttaataataatcatgcactgaaataattttgattcaatgttcttcaacgcatgtacaacttcaagaattattgttaccacttgttgtaggatctcctctgcctttctggctctgatcatacgttcttctagtccttctgttggtccttgaacttaattgtcctcatcattaattgtagggatctttttaatttctttaacaactcattagggagttttgtaaagaggccaacaattttgtggctcattgtcttgcaagaacatctaatttgtatgctagctcttatgtcttctaccaaactccattatgaatgaaataatatacgtctgttcctctataaaaattactataagaggggtacaaattgtttatgcacgaactaggtgcatttattaaaattaaaaaaaaaataaaactaggtcatttcattgttgtctaagaatagaagatttataaataatccatcatttagatgacaagttattacttatttccaattttgaaatagacacctgcacattttgaaatactcgttttcattttcagttaatatgttttcattgtaatgataaaacaccatcctatttcatattctcttaacaaaactttatcaacgtctatttgcagactaaacattagtttttttttttatgttttttgtttacaggattagtatttgatgttatttatactgacatggtgtaattaattgcgatttcaatatcaacaatgttatttgcaaggcattttaattgcgccattctgacacgcttttgttttgtattttttatatatataaaaaatattaatcacaacctttttcttttaccaaacagggtttccggaatggtgtgctaaaatcgtatacaggaagcatctcttttaatatttgcggatttgtacttgctgcatatcttctatccaacaccatttaccaatatcatccaggattacgttgtgattgtgaatgcaatgcatggaagagaggagcgaacaaaaacaactgcatatgccacatgtcatgtactaaacctacaccaacttggattacggttaaggaatgatccttggccaagttattccattggggaaggccctgcttcaattctgatgtcaccacaatgctcgctaccaagcatgattgccattagcataagtttgcctgcaactggaaaatccttgtgttgcatcaagattgtttcgactgaactacccatatcccccaaaatagaagtctccatgttttcttgtctcaaggacaaaacttggtcaaacccttcttcaaatgtttcgctttgaggtccataacacctacttgaagcctggaaaagtatagtatttttcaagttttgcaggatttcctggtcactccaaccttcagttctgtacgaatcatggaatttactccaatcgtcctgactagcagctttcttccaacaatcctccaaaagttttctgtggatcttccgaaatgaggaactagtccatgcaaacacatcaaaggccgacaatgagagttctcgatcttcaccttccaggcacaatttaatcaagtcttctggatgaagcagctgagcttcaacaagttgtctatcttcaatggaaggatgacgtttcattaattcctcctgcaggtaaagcatctaaataagaaagggtaaagaggactcctaaaagggtgcaacaaagcttatttgccagcgcaaggttaaacaagttctcatgaaacaaagcaaatattaaactattaattttattgtcatacagtcacataacactcaatgccacaagtcagtcaatttgattgtcaaacgtgtattctttacaatttaatagcatgccaaatccttcagcaggctccttattttccctccctccaaaactaaaactttttataattcctcttcaatttcatgaataatttaacttcctacaacaactgtcacatcaaacccctcaatcatgtatttaacaacttattttaaagaagaaatttaaacatagttataatattatataaagtataaacttatcatgcaattatatttgtctcatgttattgaaagttatttgtgatcgcaaaatctacccagttcaaagagaagtttttatcttgctacaatataattaactattaattatactttataatgttggtctttacaacgttgttaaaaagcggtcatggcagcaccatggtagattacaggttagatttctgacaggccaccattctatggcagtggcatggtgggtttttgtggcaggctatggtggccgccatggttcagccatatgccacaacaccatcaaccatatttttttggcagatttttagctggtcaatagaagccaccattgataacactgcgtcttaaaaggggtaagatcataagagaaaaaggtgggagtaaccaaaatgagttcaagatagattagtgactatacaggaaaggacaggatatggaatgagtgtagatgaaaagatattggtgtgatacctatcaaggaaaagaacacagaaaattggttaaagtaatttggacacttgcaaagaaagtcactagaaacacttagaggaaattcaagaaggacaatggaggaaattaccaaaaaggatctcatcataaatagaaccctagagaatttggtttctaatcaagcagaatagcatcatgtgagatgtgatctatagttgacctcacctagtgagataaaatttgttgtcgttgttgtatttatatcattatatgactagaaattaaaaaagcttatatacaaatttagtccctgtaagttcgaacttttttcaattttgtccttgtaagtttttttttttttttttttttcctttttagttccttaagattgcacttttcaattttggttcatgtaagtttttttgttcatttttagtctttgtaagtttgtgctttccaattttattcccttagagcacaaatttaaaaggactaaaaacagaatcttaaagggactaaaattggaaaagtgcaaattgacagggactaaaaatgaaaaaaaaaaattacatggaccaaaattaaaaagatgcgaacggactaagttcatatataagccaaataaaaattcaagtatttttagtaacaacagcatctgtttgctcctaacatatcaagttagctttcaaacactggctgatgtcctagagtttcacggatgcctaatactcacgatgaatgattgagaaaataaatcaactccctcttcaaattatcaattgttcaaaaataaaaactcaaatttacctgtaattttagaatcttcaaatcagcctcaatgcggtccaccttgacttgagtaccagcatctttaccagctgttgaacaaaaaaacgtaatactttttatttattgcaaatgaaatttattaggtatctattcattcaaagaaaaattagatatttaactaactaaacctgtgtccagttgaaacagtacatatagataaaaaagagagagagagagagaaagaaatcagaatataaacaccaatctttatccaatgacttgaataccacaaccaaatgtggacaagatataatgcttggtcacatgtaaatatggaaataaatcatgagataataatgaaaaatgggaagtaatcctaagatactccaaactattcaaagatatattcaagatattattagagatttttaatatattctaacacagattaaagatttctaagaatctagatattcaccaattcgcaacaataagtaaaaaggcgacattaggttgagttggtaactgacatatcatataaccaagaatccagcatattatcagagatagcagaaaacttaaagtagattgccggccattgagttcaaatactccctagttagaaggaggaagacatctaaagaaatattaaatagaatgaagagaaaggaagtagtctccataacacatggaaaaacacatggtgccatacctgcaaaggcagcaatcttagagagaaataaaagattttttctgtcagtcaattttagtttcattttcatatactcctgttctccttcctcttcagcaactgaagtagattgcatgttttgtgagagagccaatgcatgaagtgtttctgaagcagaggaaaattgatgaaggaacaaatcatgaagccaaagaagatcgggatgctcccttaggaaaatggatagctcttctggaaattcttcccctagccttaaaagttgagaaaattgtcttctttcatggagtttcttaaagacatagtaactaaatcccccattaggtcccaggctttcatgctgcacacaaacaattgagacataagcaagaatacatttaaaaaaaaaaatggcaacacatagtacatatagaatccttgtgattaaataataccaaatagaaatcataaattatcattttccgataaccaattttgtgtgaaaggccgaggttttattcaacattgggaggtgtcagcgatgtaattgtaaataacttatttatactattactagtactaactcatttcaggtgccgtgtccaaaataagacacttttatgggtatgtcttgtgctctgaaagttcataaaaataattggtgttgcattgtgcttgtgtgatggtgaagaacatggtcaaaaaaaattcgtatacctggttaacatttgtttgcacaatctttctttggaagctctttccaataatatataaaggcttaaattgaaagaaagaatatgtggagctatacaaatttggtagtactgtgaggtttgttgttggttcttaattaatagatctttattcatttaaggggcattttgtgtcctagctctagctctaggtccggatgtaactgctactattgcttccttatggacttaagttttaggagtgcaattattttttctcagcagacttctactcaatcctaaagccttatcagtaacggaatatttgggttgataagctaagaaaatcatcattgcaatttgcaaatgcctagaaaaaagggaataaaagaaacatcagtgcacaatgaagaataaaatcatagtcataccataatatttctcagtaattccgagtcattcacatcacaacaaattgtccacataactttgtagcatccatgtcgtttagcaattgataacagatgtgaagtaaccttcattatgtcctcttcattctgctctccagctccttcaatcaaatcctgcacaaaagaccaattgaacaatgtatatctatcccacaccaggattgcaaggatacggtaagcaagatagaataataaccttgtgagtatcttcaaattctttaactttttggtagagagattcaagaaggctatctcgcctctcccaatattcatttaacagacctttgtgttcttctccgcactcatttttagctgtaacagcaccagaatatgcctcaagtagaacttcagctagggcttctaaatgattatacagatctaattttgctgttttatcaagtccagatatttcatttaacaagtgaagcaggacagaagcaacactccaaataccagtccgtacaacaggttgacaataccaaggtgttaaaccttcaggtggtggataccataatcggttctcattcttatagttgaagcatgtcctaattatggtaacacatgcagtagagagttcacatgccctctggatctggattcctaacagatgctctggtcttataacatattctaactctgcatctaagcagtaaaagagatcttcaagatctgaaaccttactgtagaacacttcagcattatctctatccatcaaaaggacagtattccgacgagctctctcaccaactaattgtataatgtcccaaagggcacctgacatctgaatattcaaactagaatttgaggagtcaacattagttgatcgattttggctaatcagattttgcagttccctcagctgaatcattgcagataacttttcaccatgctccaaaataatttgtaaggcatgtcctgggaattgaaaaaaacatcatttagtaatggaatgtccatttgctgttccctaagtgttgttttaacttgcatttttacctgaaactataattatttatttcacaaccttaatctatttaatcaattaaaaaaattggctgggaaaacatgaccattaacaaaatcataaatcaaacatgccttcacttataatcccaccctaacaagtcaaatgacatcaagaattaagaatccatgtgctttaggatttcattcactccttccttacctaattaagcttacattatttttaaaactctatgtgaggctatggggaagaaataagataattaagcctcaattcatttagttgcagaataaacctccttcctttgattttttcatacatgctgaggcaaaggagcagatggatgataattgagattatattcatattcattttacccaatttataaaagtcaataagctatcagtgaaaaaccactctccatttttgcttgtgatatactttgtatgagatcatcctaaaaagtatgattatatctgattcattttattttataaaaacaggctggtagataaataaagctcatacagacatcacatacccaaataatgtaaaaactaatgaccaagttaaacataatcaaacaagtgagttgcatatggaagtattgtaaaagaaattgtttgaagatcaaatcaaaacaaataatcttttggtgaatagactaaaaatttcatactctgcttagaacatagctcctcgtggcatttggataaggcaagaaagtgaaggaacttttgatgtttctgctgcttttctaagagttgggttgaaacaacagccatggccaaaatctctgctcctctggttgttgtccaatgtttagctaaggtgtctatgattgatttgctcatccgaacaaaaacattggtttccccatccctttcaaatgaaccagatgtttcaagcttttcaagagacctatcaatttggccagatgataaaaaatcattgaatagattattcaataaagcttctgattcttcatctagagcagttcgacgtgcaatcccactcaaaaccgtcctctgtttgtctccagcactccatgcttcagagctagcccttctaggagcaaaattacctgcaaatgtaagatttcttatatctttttgtgcagatctttcatttgaactgcctttacgagataagcttctctcaggtggttccactcctccaagtataacagctttctctggtattgcccatattcctgctttctctgttaatacaacccatgcaccttcttcataatcatctgcagaaggaaggatagaagcatctagcactttcccagcatcataaggtaaatcaaactgataaagttgtgtagagtttctataataatgggagacagttgctgttccatccccagatattatgactgcagatcctgaaggcttgccccctatccgaagcctcatggaaaacaagaagtcttcgtcttcaactctagcttttggcattatcacctcaataggggcttttttctccaaaaccctgtcatttgtagtctctaaacccaaccctgatttatattgcatggtcaagagagagtactgcatgtagcttgaactgctaatccggtcattgcaaaaggttgcaacaagaatggtaatgactttaccatgatcatctacttgcatatcaagaggccagattctcttttgaccagctagatccttcttaatgccaacctcagcatctgttccaacaattgcctgagaccaaagcctagaaataggtatatcagaaccaaactctactctgaaacactgtatctcatggtctgacaataccaagaattgtgaatttgattcctgaatagaatgatgtggaaaacaccacgtcagagacctagggtacccaatattgctcacaatttgacctgattcaccctgttggagccggaaattttgatatactttccttctatgaatgccagtaggagtgcattgaaactgccaaagttcaccactcgagctacacacaagggcaacacatacaaacttacaactgggatcagcagaagcaatcatagagttaaatgtgtgcaatccactcaaactacttcccagcttactttgtcgccgctgcctgtcgaaggatgctttcccatcaggagtcataacagcctccagctcatcggaagacacaagactagtgaccggagcgtgtgactgagaatagatgtccggccagtatataacagcccgagtccgacaattgcacaaaaccacagcagcagagttgcactgtttagcaactttattcgttcccacaggcatggcgtcacaattaacaacacgaagcaaccaactaccagcatcatttctgccaacatcagcatcattcaaaggaatctcgaggacaacacatttgatggagttagcaggggacaaataactccataggtagaccctgttcccacaaataatccaagcaagggatgtgctcttgtcaatcccgccacacgcgtgatcttcagctgcattgcgttacatcataatctcaaacacatcaagcttaatttacttcaaatgtgaagggattaacacacgtgctaactaacacaattgagagacaaatcaaacagttctcaccaggaattcgcttgtgtagcaaaatgttctgctcatcacgaaccacttgcggaaactcgccgacgaaaacaggtttggtaggatctgtatcgtcgccttttccacttctgttgatctgaggaaccctacgcaatgaaaacggataacagttagaagcagaaagcgaatcgatgcagattttggtgaagaagtgaaatgaatgaatgaatacctggcaagaacagataagcgaggaacccagggagcgggagtgccggtggtcgggcgattgggaacggcgttatcgtggaaagaggttcgagcaggagtgaccggagaatctaccaccgtggaatcgcgaccttgctctctgcgagagcgaacattgctcttcttcgttccgcaagaaaacatgatgatgatgatgatcactcagtaccggcagattttagggtttatggggttttcgccatttgaatcacgagagggaaaatgaagaaaatgaaggaaccaaatatcgggttttactttttaagtgtaataaaattttcactcataacgtcttcatttttttgctaagggggaattctttctctttaggcacttgtgttcatgtaaatttgaaattataaagatgctaaaatatctcttagaataaaattattcaaagacaataaaaagacaggttagatgaaaaataatttataaaatatatgattatcttatcagtttcatatttaaaataagtataagcacacattatagtgttgatatcattcatacggaaaatatattctctagttaaaaggttatatatgacttaattttaaccatataagcaaaaattacttgttaatttgtatgcataaaacttacattttctgtgggtgttgcattgcatatatgaatataaattacactcataaaaatatgaatataaatgacggttctaactcactcattcttgtaaactcttgattattagttaaagtttatttaaaaaattataaaattatgagtgaaacttagtaaataaaaaaaaatctacaaaaatttataaattatagcaaatttcaactaataaaaaaaagtgttgaagaagcgcattattactcattagcatttgtcatgactagaactacaattgtcgactttaaaaaaaaaataaaaaaactacaattgttgaaaggggtcctaattttgtgtatttgctactgtggtattcattatcttaaaagcaattactattaaaaaattattatatgtaatttatttatttttgaatagccatgaccgtttttcataaaagtctctgcattcaatgcgaaaccgtttgttgtaacccaaagaactaacaaatgcgaagggatgaaataaataaaggaagccaatttcgtctgacgctgggttacggttcaagcagccatgtataagcgaggataatgaagcgtaagagcatgaggcagtgcctgccgtagtggccagtcactactcactaatgaaaggtaaatactttgataatcttgaattttttttatttttttttacgttttagtttttctttttttttttttttttttgtccttaaaatatctaaaactttaaacagtaaaaaatagttctttgaacaataaactattatttaaaataatttaaaataggacgaaaaaaattgcacacaaaaaatgaaaaaaaaaaaaaacactaaattataaaaaaaaaaaaaaatgtatttatgcagtacatataataagctcgtcatttgatatcatagctcaaaatttcattttcaagatgacaaatttatgaacaaatgattagaagaataaagataacgggtattggaacttgaagagaaacggcatatatcgtattttcgttcacatataagagaatacataattacacagcaccggaaattagtgcacaaggaccttctactgcataacagttcagttctccagaggagaagaaacaaccaggttttggaatcaaaagcaaaataaaataaaataaaataaaaaaaggggggctagaaaaagttctttcctatcttttgttttctaggcaaaaagaaatttgctatacgtacactggtacacatgcagaggtttaacttattgtattatcatggttccagcttcaaggaaacaactcttgattgtctgttggattttgcaacctttaagaacactgtagataggcaagccggtgcccaccatggccgccgcaccttctgctcccctttcagacaagccactacagacatcaatatagcattcacaagttaggagtattaacagataaagccatttttttcaactttaccgggggtaaacacccccctccctcccccccttcttttttatgttgttgtcacaagaaatatcatcttgcaagaaaagtcacaacacaacaaacagaagcagcatatgcatattttgatgtctccttatatataaacatatcacatgtttaggaatggacgtcttgacaatcaagttctggatgactccagcctatataataatatagggtttgattatgtttttggtccttttaaaaattcacaaatttcacatttgattctcatttttattatttttccaaatgagtcctccatagggcatgtttgttaccaaatgatttctttgttgagtttgatttatatatttattgtccatgtaaaacgattttacatacgcatacaatatgaatttatcctaacaatgcatattaatttaactcttttttatttttcccatttgaaccttcttaaatactatattacaaaattttcatctggtccctctaaatgagagaccaaatagaaaattctttacatttagagaaactcctgatatctccaggaatcaaataagaaaggaaaactgcacaacctagtgatattttttcatcaggtaaagaaaaatgtcttatgagaacattaatttgaaaagaaaaaaaaaatgggaaatcaaattggaaaatcacaaaatttttagtgtctaaaaacatatatataaggaagcgatttttagaaaatgtaattcacaaattgtcttgatactcacaatatagaaaaatatgtgctatgatgagaccctttaatggttgtctgtaatgaaatgacagcagtaccaacaacttataggcaagttatctcactctaatacagtaatactaaacgtctactctaatctttcttctagtacattcatgtttccttatagattgttcaaatagtacgaaactgattgtgacaacatcaatgatcatgccttacctaaccatggaaagagcacaaaacagataggtaaagatgaaaatttcaaatgagtttattgacaagtgtttttctgtttactgtttaaagggggaaggatagagagagagagagagacctttaatccgtcttaattccttgcacaatgtgatgaagtctccccacttcatgtggcaacgtcttataaaacgtaggatctgttcagtcgtaaacatggacatgccttccaggtattctccattaacaccattttctttaaaaatttggctgtaactaccaagatttatagtctccagccacaatccaacatcctgataaaacatgcaagataagcaagaatgcaactgttagtttaaattatcagttacattttgattctgccatggagatgcactatattttttttatttttttttttatcagcaaaaatatgtatatatatatatatatatatatatataaaggataaaacattacaagaaggaagtagaaaacaatccaggcataaagaaaccagacctatggtagcttaatacatgagtagggcatgaattaaactaccaaaagctggctggattgtgtacaacccttccctagatggagacgcactatatgatatgtctgtgtaacagcactcacatgttatatacaccaagaagaagaagcaaatccaaaagggtttatacaacaagcttagatccttgtcaacataggtctaatgtaatttgcacaattcatcatacagaaacagcagcataaatgaattaaaagaaaatatgtggaagcattccagagcttactacgttatatcagtaattaataacagtgcatcaattatactgtagagtctagacctgtataacagtgctgaataagcattattgaacactcaatacataagtagaaacatacacaatacatgagtagaatcataccgcaatcttgtgaccttgacacacacatcaaaggagaataacaagatgatacctctttatctgtaatagtttacacttcagatacatgaccttaataacctacttaacagagtaactgacaacaaggataaatcataagctggccacatcactgacagaggaacagggactaagggcataatcaagacaaataatatattggcaatctagtttcagatgctatttttccaaaacatagttgcaacaacagtgtttgaaaatccaatgatcacagaaagatgcatatagctttgcagtggaaactcatcaaacgaagatttacacttatgtttgtgctgcacaaaggagtaagtaagcattcagtgtaatctattattttctttgagagaataatgtaaaagccctcactttaaaatgatcatagaaactgtgagtgtcaaactgaagaattgaacaaagttatctggcaagaattggaaacttaatttaaaaaccagataacttgtgaaaacaacagggaggagatgagattcacaattaaatgaaataattcacgcacaagtttgattagccaattacttccaagttgagaaggacttcaacatcatccaccaaatttcccacttgattagacaatactatgttcaactttccaacatataaaaacaggtttaatctcagtctttacttgtgttatcggagaagcaaacgaatatcacaaaacagactatcgtggacaaagttcaagttatgtacccaacaaatttagttaaactaactgttgcaaaaaacctaattacatgttaaaagtacaaatcacgtaaaaagggatcacaactcacaaggcgtggttttttattatgagaaaatgtaaataaaaattaaaaaataaatacatcaattgacaaagggaatgaaatgattaacctcaacagtccagatgaagaaatcaagaggctccggtgactgtcctttgttcatttcccaaatcaaacttcctcaaatacacctgaacagagaccaaacaaataagtaaaatcccccaccaaaaaaaaaacagtttttctcgaaaaaatccgtaagaaacttttcccagttaagtaaacgataaagggtcgatctgacaaggagaagattggacaacccgctaaaatggaagccccaattacaagatctcaaggactaatttattgaattaaaggagaaataacaaatcaaaaaaatagtataaactaaatatgcttaccactttgcgacagtaaaaattgggttaagattaaaaaaagggaaaaagaaaaagatattctacgtttgatgtgaggaagaagacatggagaggagagagaaagtaagtgatgtgagaagagatgttaagacaggaaacaagagagggagaaggcttttttttcaactcagaattgcatgcttcgtgttaacgcatctgccacgcaccacgcgactccgttgcatcacaagccacgcgccagccttgccacttgctactcgaaaataaataataagtacattatttcctctaaattttgtgtaacattattgattaataatgtaattttgtggctgaatcatgactttgatgtttaactacctaaataaattttgcaaataagtctctagacatagttaagtgtcattaaacaaatgcagtaagacaatactagtacttctaaacaatatatattattttttctggttataagaaatatagatttattttcaaatgtattgattgttaattaattaattacttgtagtattttagcttacatattaattaaaatttataatttataataaataaatatttttttagcgtataaatttattataattaaaatatataatatattaattttttaacatataaatgatattttaaatttatgataaataattttttctgtgtatattattattttaattattaataaattcttttagtaaaatatttaaattcaagttagaactataaatattaaagatgatagattgaatgagataataagttaaattaaaccgttcaattaatatcaaaagtataagatggtatataaatgcatttttaggagcatttctgaattctgggcactgaatatacatatttgaaattgatttctcagttttaaagtgttaaactattcaattgatattaaaattttaaaacatagaaagatatatcatatgcattttaagatagtaaagttcatcatttcacaagaggagggtattaaaatggaagtgaatatgaggaagagatagagagacaaactagtcttaaatctttataataacaagggacttgatatatttttgtaactttaacttattacaaaatatattaatgagatattcatgtatggactttttatgtaattatttttgattaaaaattatttttaaattacatataatgtcattaaatataattactatttaaatcatttaattctatgagtatttgtgaaatgaaattaaaatttatgacattattaattaaattaactaacttaactattttctttacaggaggacgatagccgtgtgcatgggttgggtgcatgggttgtattattatcaagattgaaaattttcattgcgaagtgctaagcaggaaagtgtttctgtgagaattgaggtgttgttgatgagtctcataatgtggtttcgacgcatgaagaaatgttttttgtgcaaaattaaagataaataaaatgacaacaaatacatgtcacatatgcctttcttaattaaaaagataaagatcaaatgtcgatgattctttggtgaatgtttagctaaccaaagatattgtccatataatcgattttgcatgctgccccaaaattcaaggagatctttttttttaaaaaaaaatattatgtttaaaatctttgcaattttatttagatttaaatatttaattaatttgttttaacttattttaagaattttcttatttttaaagattacgatgatgataatatttaaattttatattgttatttaactttgtatattaaaaataaaaatcttaccatcttgtttatctaagatctcttaagtgtatggataattgttgttgtgtgtggaaaagtttttttaacattgtacaaattgattaagacatagaagacatcacatgtatctactatgagtttctaagtgaaaatccaaaccaacactataactgccattgaaaagcagtatatatgaaataggcttaaatatattttttatacctgaaaatagttttttttaattactacctaaaattcatttttggtcatatatgtacctggaatttttttatctttcaatggaatatatgtctttaatctcgttttgttaaatgataacataaaagataaagtgtcatttcatgaagctattacacttaacacatagccaaattgaaaccatgtcattatttattatttaatttattttaaaaattcaattaaaacaaatgggacttctccttctccaacggaaaacaacccagtgccatccaacctcgcgccaccactgcattgccatgaagatgttgcaagggatgcctcattccaatcacaacccttttgacccctccctagtttggtttcacaaagggtaggatcatttatcaactacaaaacacaaactaaagccccaacaacaaacattgtattcgtgagaaacaacaacaacatcataattgtaacacacacatgtgggtttggtgacaaacagaagaagaacttggagtagagcagagatggtgttgtggttgtcatggcaatcgttgggctccatgttgaggtaccagtggtgccgcggcagagttcgtcgacaatgttgacggcctagatctctgcgacgactgtgccctgggcatagaggtagccctcgccgacgactttgctagagagggagacgatgatgcaaccgaagttggggtgaggggaggtgaaggaagaaggagaagaaggataattgaattttttaaataataataaatgatatggcactaatatgttagtgattatgtttgatgacgtgacattttatctgccacatcatcacttaacataatgagactaacatctagtattacattgaaacataaaaaaaaaaattaaatacatagattatcaaaaataaattttaaatagtaaattgaaaacaatctatttttcaggtatgataacatatttaagcctataaaatatcaatttaaaccggctagctttcttcttggccaacaactaaatagctttacttgtgcaaatagcccaagagacaatcaatatttttagaagcaccgcaaataacaaaccaaaatatatttgaaatgaggagaaatagaaaagaaaaagaatccattagcgatatcatccgcggaattttatattggttgaacctccatatatcgtaccttataaagcaaagtgtgtatagtatttaccaccaaaggaatcaggaaatgattcgaaggaactcataataggttgttgcagttgaagtaatgatagtttgagacaaatgcggacaatgaaatgttttatagcatgtcattgagtcgcttggaaaggcttgctagttgtataaatataagagtttcaattttggaaactcaacttccttttctatttcatcaccttgttagttttcaaaaaatttcttcaacttggaggctccattaataatcgtaagttttatatgcagagtgagagatcaaaggttacaaattgtggcatggttatatgattagtgttggtgctagttttgggaatcatgaccgtggagaaagaagatttgacaatttctaattaccaatatcctcttcggtcacttaacactttgtttgtttcctatgaaagtaaaaggtgtgaatgtgaaaaataataaaagacaaatcacatatttgttttattaaagatgaaagtaaatattttaaaaaaaaaaagactcatgagccccacatacaagaaaatgcatctcaaaatgagatgaaaaacacactaaaaagtcattattattattttactttgacaaataaccctttcaagggccctcgtacatatggtgggccaacgagtgattgattttggatttgacatacagtcgattatgccaaatagatatcgattatatgcctttaattaaaagttttatttttttatttttttatttttacactttcatttattttcttacctttctatcaaacacaatgttaattttgggaatttacttatctacatatactctgacctggttttaaattggaagccacacaattgcataaatatacacataatcccaaaaatgacatacgacaacgtggactcatgtattaattccctgttttgttagatgaaaatttgcctcatatttattttatgttcgcacgtggacatgttaagcaaatatcaacgaattttaccaaatataaatttgttaaaatatatccttttgaaagttattttttttaaaaacatatattcatacttatggtgtagtgtagtaacactccatttgaaaaacaaaacacataggaatcaagctgctaatatcatgacccaagcccaataagaaaatggcgatgtttcaacagtggcgtaggcccaagcccagctgagccggcccactattgaagtctgaactcaagtcctaccatgttggttcagttcagttcaccctaaatttcttccactatcatcttctctcagtcttcattgtttgttgggggaaattcgattcggtttcgcaggcattgcctcgtttcgaaatccatgctatttctgtttcgttccttagaaaatgtgttgattgattcatagaaatgtgttttgcagagtagaatgtttgggacggcgattcgatgtttggcgaagaaaccgaagccgaagatgggacccgtgatcctgaaaacgccgccggagcagaggcagacaatcacaagaaccctcttcgatataattaaggagcatggtcccatcactgttgctaacacctgggaacgtgtccaggtactagtaccttcttagcttctctctcacattctcttcaatagtgctgaaaatagatataaacttgatcgggttttaggaagttggattgaaagatttgacaagcaagaatcacatgaaaatagtgctgaaatggatgagagagaggcagaaggttcggctcgtttgcaaccacgttggagcacacaaacagtttctctacaccacttggtttaccaagccggttacccctcccaagaatccctcttgaaagttgaaacttaatcatcagttggttgctgctgttttgtaccatgtcttgtcaagagtaataatttcatcttagaaccgttattcaatagagagaatctaaatgttttgccttattttccattgtttctgtctctgtgttcttcactcacaactcacatacctattaatgtgtgtttggatagcttctaaaattatcgtagattatggtaaggttgatcaatcttgattttgaccaaattttgcatgtttagattgtagaggaactttttgcaaccacgttgaagcacacaaacagtttctctacaccacttggtttaccaagccggctacccctcccaagaaccccctcttgaaacttactcatcagtttgttgcgctgttttgtacaatgccaagagtaataacttcattttagaaccattaatattaatagagaatctaaaaatcgggctttattttccgttgttttttcttcttcactctgttatttctgtctctgatggattgaatgatagtagaactttatgattctgaatttttccggagttatgaattttaagaaggctaaatcatcataaaaataaaagaactaataccccataaaaatagatttattaacggttaaaacatggagatcatatctattttcatgtataaatctcttgcaatttgatggttaaacttaataaagtgaaagaaggtgtcagctagtttatgaaaggatccagaatttaatgtaacacttctcattttaaagcattagtttgtttgggttggtgtgtgtttctggatgggtgaatatccttttttaggggtaaggtatgtgccttggtgcatgtttcgacggattgaaattacgagtttcatagatcatcatctaaaaaataaacttcctagcatcctcgatagtatatgatacagtataatatgcttaccagaattagaggtttgcatcatgtcctcgatagtagtcgttgaagttagtgataactttgaacaattgtgcacaagaaaattaatcacgttctgaaactatcccttaacagaaattaacgaggtttggctgttgtgttgagactacatgtttcagttttggaagcaaaacctctactcatacctgctacaccttcaaacacttgcatgcactggacgagaattttgagattgagagtgtgacaagatggagtttaaactgtttgggatttagaatttgagatattttcattttctttatcgtccttaatgatttactccagttcctctcaatgttctaccactaggacctttaacagaggtatcattctcaagacagagatgcggagaatgatagcctttagttttggacaattgcaaatgtgtagtttatgaagatgttgaacatgaaggctcaaaaaatgtttggaactcgtccatatataccttagctctggtaaattgaataaccttaatagtgaggacttctaagttctaaccgttgattggaaatccctcaagatagaaaatttctttgattttagaggtgttctcaataataacagatactaaattttgcttaatagtcataatcgttgccattgaatccagtaaaagcatattaattatgaaatctgatacaaatattaaacatttcacattttaagagaagtgactaaatagaattattgtcatgcttataaaacagatagagtcaacgttttagaactaatgatccgaatgggtaaattattgatagacagagtagacaactcagcatcgtttataacaagcagttgtaaggatgagcatgttccaaaataattttctgagcaaatgccgatcatatttggcaactttttcctaaacaggaaactcaatttaggacttgttttgacgttccttatccaatggtgtgttatagacttatagctgattgcaattttctatcttcagctcttttgattgtgaggtaggcctcctaagagcgctggaaaatagcatttggcttaaaatattatcttaaagctggaaaaaacaattgggttcaaagataattaattcaacaaaatatatatgtttattggtacatcaaagtacagttaattcaagaactgacctggtttaatgtttcttaaagtaaatgaaagaattgaactgttttcagcaaatgtataaaagataaagggacaaaatatttatctaaccataatttgcacaagtccaaaaacgataattatttccacagaaaatgctacataaacataaattgctcgcactacacgtcccaaaaagaattctacactcagaaactgacagtctcattcttagaagaattgcaaataacaccaaaatgtatatctaaggagaaacagaaaatccactcaaccaaagggtagggctagaacttccaaatcacaaaaagtcgaaacatttttgtttgggcatcaacaaaatcatcaagactctttaagttcatcttgtatgttgcgtagttcctgagccaaatgatcatgcatcttaagaagctcaccaattcgtgcttgtgcatggtccagccaggatcccttgccacaacacgttgacgcatttcatcaacatcatgacctctcaaatccaagttgaacagcttcattgcatagtttatggaactcgttttctctctgaggagtaacactaacggcactttcatttcgaaggaacaacaacatatctgccaaagtttccaacatccatgcgtgaaaatgctcactgaacttcacacaagcattccaagttgaggatatgctgctattgcctcgccagcagagcaatttgtgcatcatccagatcaacaaagtgtttatgtgctcccaatcttgtacaagtatttgcagaagctgataaaagtttaaggagtaggtcacatataacaaagcaataaaaagctattataagaaacaattcctattccctttgttttatccaataagtttgatccttcttggatttggatgtttttacaaagtgttattcctatgttgccttcattcagcttatcatcgttcaacaacctgaaaatcttgtgcaagtatgtcgctgccgctagactcagctgtgagttgccacaccactgcccaagctaatgctttctacaccagctgacaaagtgtttgctgttgctccctctgatggaggccccttctgaatgctttcttttcctatttccttaatattttgtgcatcacaaatgaataaaaatgtttgagccgctttaaaaaggtcagttgtttaataacgtacatcaggtgctggcatgacagtaatttgtgcaattttagtggttaccattgtttctccaagtgcctgtcggtctggaaaacctgcttcattgcttgattcttcatccaccaacttttatttgcaatactgaacaagcatgacaggaattagtcttactattaggaaatctattttcaagcttggtaattattaaactcgtatgcaaatgtatattatgtagagaagttgtcatataagttagagacgagcttctcacctctaaaatagaagttggtattgctagttttacagatgttgggacatttccaataatggttctctctatttcatcaacactctttacaatgccaaaagttatgctgatcagcatgctaactttcattgtggctattttaattacttccttcttctccatatttagtttactaatatatagttttccgaaagattaaaagaaaaaacatatacctctgtcatgtttggggaagaaatgggtgacaatttttgctccaacgtttgtggtaaaataataaatagaagtgaagtcttaccagattctgccagtaatgacattcttccgtgcatttttcccttctccaagcatccaaatcaaagaaattcattccataagtcgaaatcaattatacaagttggcttttgtgaatggaatgcaagaggtttggcttaaatgtactcttgccacattgcagttgtgtaattttgattctcgagtttcaattatacaagttggaaaaacaattgggttgaaagagaattaatttaacaaaatatatatgtttgttttgcacaagttaattcacgaactgaccccggtttaatgtttcttgaagaaaaagaaagaattgaactgtttctagcagacgtttaaaagataaacggatatatatatatttgcaaaagtcgaaaacaataataatatccatttgccacataataaaatgctgcataacaaacttaaattgctagcattacacgtcccaaagaacacagtagactcagaaactgatagtctcattcttagaagaattgcaaaatgtatttgtatgaagaaacagaaaatccccacaagtgggacacaaccaacgcgtagggctagagcttctaaatcataaaaagtcgaaacattttgcctgggcatcaacaaagtcattaagaatcttaagttcattctgtatgtcgcgtagttcctgagttaaatgattacgtctcttaagaagcttccggattcctgctcgtgcattgtccagctcaggatccctcgccacaacacgttgacgcatttcatcaacccatgacctctcaaatccaagttgaacagctacattgcataatctatcgaactcattttttctctgaggagtaatactaacggcagtttcattccggaggaacaacaaaatttctgccaaagattttaacatcaaagcttgaaatcgatgactacacatctcacaagtattccaaagatgaggatatgcttttattgcctcctccagcagagcaacttgtgaatcatccagatcaacaaagtgcttacatgctcccaatcttgtacggatatctgcagaagttgctaaaagtttaaggagtgggtgacacataaatataggatggacaagagacaataagagagcaataacctggagaaacctcaatgttgttattagaaacaatgcctattccctcttgtttatccatcaggttcaacccttcttggatttggatttcttgacatggcattatttcttggatttggaaatcttctgcaagtatgtcctttctactagagtcggtgagagtcataacaccactacccaagctaatgctacctacaccagttgacaacgtttttaccgtagctccctctaacggatgcccctcttgaatgctttcttttcctatttcctcaatattctgggcattacaaatgaaaatgaaaaaaaacgtttgagtggctttaaagttatagctatgaaaaggaagatgttttataatgtacatcatcatcatgcgctagtattactaatttgagcgattttagtggttaccattgattctccaagtgcatgttggtctggaaagcctgcttcattgcttgattctttatccaggaacttttatttgatatattgaacaagcaacacaagaattagtcttactattatattagaaaatatgttttcaaggctagtattattaaacttacatgcaaatatattttatgttgacgagttgtcatacaagtcagagatgggcttctcacctctaaaacagaagttggtattgctagtttcgctgatgttggaacttttccaataatggttgtctctatttcatcaatactctttacaatgccaaaagctatgttgattagtaagttaactttcattgtggctattttaattccttcctttctctccatatttagtttactaatatatagtttttaaaaagattaaaagaaaaaacatatacctctatcatgtttggagaagaaatgggtgacaatttttgctcgagtgtttgtaagtttgatgtctttttgttttctctctctgattcagggcactcgcctgtttcgaacacagttgctctgctttcaaattgcttatgttcacgtacagtttcagctatgcttccaagaacaaattgattgttatcattgacttgtggagtaggtggtttacttttggatgttgatggatcttctaggttcatttgaaatggagaagtgttttctggcacggaattctgctcatgctgaaaataataaatgagaaacaagttggactatgttcaacgattgattccatacaaaaatatgcacgtgcatatgatttatgctgagaagtaactaatgaccctgactgcgagctaattgattctaaatgagttgacctagtaatgtcattgcattttctaatgcaattccttctctgacacctctcttaatattctgcagaaattcaagaaatatgcaattttgtagcatactttcattcttcttgtaaaatgaaatgacaataagcatgtcagcctcaagccatttgaaagggaacaagcattggtccttgtttttgaattagaggacacaatcaatgacaattttctctgattgataacctttttgaataatttgttcattgggtttctgtagtctatattaaccatttcttaaatattcagaagaatgtgcatatttagttggtataacattatttacctgaggaattcctatggtactttcagtttttccaagtggcctttgttggtctgtaaaatatgatcgactcgttgattgcccatccaccaactcctacatgaagtgatgaattaaatgcttgagtcttaagctattcacttcttccaatatttataatagcttatggtatactcacctgtgaatgtgtttcacgttgacaaatatccaagggacttggggttggccttttattcagctctgaatttgttgaagttgcagtagcctgtacctctgaaccaggaatgttcccaatgaaatcgttctctgatttttcattaatctgatcaatgacaaaatatacaaaaagaataactcaacaagtaattttttttaataaatataatgaaattataaaaaacgaggatctttttcaattaattaagtcataacaaatgtagacaagatataatgaagcaatgacacgtattattatactgctgtcaaagtttcgtgaagtaggtgatgagttatccgatttgatgccattatcattgtgattgtatttaggtaggttaacttgcacagattggctggttctaacctgtgatgaaggcaactcactggtgccgctacttgtagaaacttcatctgattcaatcatattgcaaaacaagtggacaaagtccaacggtgaaagtccaatgtttttgaaatctgtaacaaaacattataaattaaaggacttcatttgacaatgaaacacagtaacaaaaatgcaatgcaacttcaactttccatggtagatcattatattgtcacaagtgtgtttgtaaggcattctggcagctaataagctacgctgactaacttataagttattctgacaagcttgagtggtaagcaagcttactttgagcatccacaatgggcaaaaaaattaaaataatgccttttaaataaaaaattaccaaaatatggccatttgaaacatatttccgaatctactgctgccaaacacgtctgggtaagacgtgttaaatcacgtcgagcttggacgtgttcaaacacgtcgtgggatggcgcgattaagcacacaaacacgtcctgtgtgggcgtgactttgcacaagacacgtcctgtatggacgtgattaaacacgtcatgcagggacgtgatttacataacaggaatccccattctctctgcatccccattctttcttcagtttttccaatccccaatttgcataaaagcttgctttagttttatagcttgtttgatcgtgtaatttcaaattattttgttgcaattttcataaattctttactatatgacaaaatatatgaaccaaaagtgaaatgtaaaacaaaatgattaataagatgaaaagaataaaaagatataataggtcaaattaattttataaaatcaaagtttaaaaacaattaccaggttatgtatgtatcttttatatcatttttttgtacgagggtatgtatgtatcttttgccaaaaaaaatattcagtttaagtaagattaatatgagtaatatattttttctttaatatttaacgtaattatatgtttaaaatttaaatttaaagcaacttattatattaaaatattattttagtgtaattagaaggtatctaaaatttctatttaacgcctaattattttccttttttatattcattttaaagtaaatatcttttgtcataatttcatgctgtaaaaaaataaactttagatgttgattaaaaaatcttatcatccgttagaaagatatgaaagtgaaagaaaaaaaataaagagcaaagaaaacactaattatgatgtattttttgtttgattgaaataaaaatataaataatggttgacttctaaaaaaatctcttacttgatttaatagacgaaaaataaaattatagaggaaaaaagtttgaaattttgacaaaatctcttgcaaagaggaaaaaatctcttactttatttttcgtctattaaatcaagtaagagatttttttagaagtcaaccattatttatatttttcttttactttctctccaatcaaacaaaaaatacatcataattagtgttttctttgctctttattttttttctttcactttgatatctttctaacggatgataagattttttaatcaacatctaaagtttatttttttacagcatgaaattatgacaaaagatatttactttaaaatgaatataaaaaaggaaaataattaggcgttaaatagaaattttagataccttctaattacactaaaataatattttaatataataagttgctttaaatttaaattttaaacatttaattacgttaaatattaaagaaaaaatattactcatattaatcttacttaaactgaatattttttttggcaaaagatacatacataccctcgtacaaaaaaatgatataaaagatacatacataacctggtaattttttttaaactttgattttataaaattaatttgacctattatatctttttatttttttcatcttattaatcattttgttttacatttcactttttggttcatatattttgtcatatagtaaagaatttatgaaaattgcaacaaaataatttgaaattacacgatcaaacaagctataaaactaaagtaagcttttatgcaaattggggattggaaaaactgaagaaagaatggggatgcagagagaatggggattccttttatgtaaatcacgtctctgcatgacgtgtttaatcacgtccatgcaggacgtgtcttgtgcaaagtcacgcccacacaggacgtgtttgtgtgcttaatcgcgccatcccacgacgtgtttgaacacgtccaagctggacgtgattcaacacgtcttacccagacgtgtttggcagcagtagattcggaaatatgtttcaaatgaccatattttggtaattttttatttaaaaggcattattttaatttttttgcctccacaatgggagttgtttaataggttacttataaaaaaatattattttgatatgtcacatatttgattttgtgttgtttatataagtaactattactcataagttgcttaaatttgtattaaatacaggagagagaaagagaatatttgagttaaacaacatgtatgttaattaagtttattaatttttttaataataactaccttaaaagtcatagtagtaatgagttttattggttgataacataattttttttcactgattgtgcctagttattaaacttatatatatagcttatgagctaatcttaccaaacaaatccatcagtcaaggaatgttccactatgcataataaggtgaagagtattttttttccaatttagatgacttctgtatgatggagagagtactttaaggaggtggagtaaggtgtggtttgcactaatttgggtaatttggttgggccgaaattcttgtacattcctagaagacacaaaagaggtggaggaaaaggtagaaatcataaaatattattcttgggaatggagtaggtttatgaaagtgtttaactattctttgttcagatggattgtaaatcccaaggcttgccttggtgtcctttagttgagacggggatcaatacaattgactactggagagagggtaaggaggtagaaaacagtggtggaagttagaaataaggtatgtggagaaggtgatacaaggtggttaacaggaataagatagcgaacttttttagtattgaagtgatacagtgcagggtagaatgaaagtggtacgcgtgactgtttaagacagacaaggccaaaaatggtgtgggtataatgtttgctgcagctcaatgcatgagatcataaggcaccaatattgtacgaggatgtttgcaatggacatacacgatatgaacatctcatgattatcacacatatactattctggtctcaaatataaaaataaaataaaattattcacactaatttaaaaaagttaattaattatatttaattacatcaatcttaattaattaatatttttaacttattcttaattgaaactaaaacctcaattaaataaaagatattttaaaaataatatcattaaatgaaataaaattaattaaatttttttatatttaaaaccaagaaaaatatgtattttttcttatatttatgataaaagaaatacattatatcctattgaagcaaaccgttgttcactttgtttgggtggcaagctgttttttgggacttgcgtagaatacatggtgggctgtgggcacgtggttagaacttagaaagaagatacgtaacgggtgacgaatgtatgagagattaaatcaagagaaaaatgatatgtttagatgtaagtttttttagaagtatttttaaaataaaaaattaaaaaaataaaatgaatttctccataaatttaaatgagttttttaacttatttgtagatatcatctcatcttttagaaaaattatattagtgaatttttaaaaattagttaatgaagaatttatatttatttataaaaaaatttatctcttttttttttcttcttttaaaaatgtttctaaaaaagtttactcaaacacgccaaaaacaaataatggtattttatcacacgtgtttggttgtttccaggggtggagtgtaaggaagcttaaaatgtcatttacatctttttttgttgttgtaggggttctacataagccttggattagaggtactgtattgggggttaactgtgtgctgttttggattttcagatcttaacactacttgtgttaggtctgtttacatgctttataaatgtatattttttcttttaaaaaaaacaaaaatcttaccaaacacttttttatcacgaaatttgaatgaaataaatattttctttaggtggaatgaggaaacgcaaattgtatgccaattgaggaaaggcccacatcaaaccatggcaatagcatatgcactacaatgggataagggacaacgattaacatgattagacgaagagttcatattaaataactgtatttgaacacatttagcgatgcaatgcatttacctgaataaggagtatctgcacagagctcccgaagagtagtcgttgaagtcaaagagagttttggacaattgtggacaatgcgatgctttacagtcagcaattcagtcccttggtgaagggttgagagttgcataaatattaaaagtttcagttttggaagctcaactttggccttttctatctcaccaccttttcctcgtttaaatccaataagttcttctagttcagtcgctccatctatgatcagaagctctaggttgggaaggtcattagatgcagatgcagagaataaatgtttcaacttgtggcattgttcaacaaccaccacttctagttttgggaaacatggttctagagaaacaagatttaacatttttttatcttcttcgatgatctgctttaattctttgcattgtcttatctctagacgcttcaactctgataggcatcttaaaacacacagaggaaatattacttccaatcttgcacatctcgttatatttaatgttccaagatttcggaagctaaaagaattcctggaatatccttgttcaaatccaataatctcctctagttcagtggctccatctatgataataacctccaggttgagaagatcactagatgaagacgcagagaagaaacgtttcaacttgtggcattctttgacaaccaaatctactagttttgggaagcatggctgtgtagaatgatcagacaattttttatcagtcacgtcctcttcgatgatctgctttaattctgtgcattctcttatctctagatgcttcagttttggtaggcatcttaaaacacacgatggaaagattacttccaattttgcacattcctctatgtctaatgttttaagatattggaggaaaagtgaattcttggaagccacccaaatatatgtcatttgaggtaggtcgcacaactccaacttttttaacttcaatcgcacttgttgtccaatctgaatgttttttcgctgaagatgttcaaaattattatgagtctctttatttaatttcgcctggcatccaacaaaagagacagataatatatgttgtaaatcacacccttcgatggatagccgtttcaaacctaagaacattgaaatatcactctgaaattcacgatcatcctcaacgacgttttccttttgatttttatgacctctttcacgagttaggatatgcttcaaaccatcacaatcttctataattaattcttccaatgaagtcaaggttttagccgtggatgccgtaaacaatgagcccaatttcggacatgatattagctcaagggttgtaaggctggatagagtaaacgatcctgaaaaagcagttactcataagcaaaacattgccatgcatattagaatcaattatataaatgttatgtcgtcaagttacactttgatttttaaaacgtttttttttttttggactaaaacaataaacacaagcatcaaattaagttaataatgaagaataaaatcattctaggacaatattcttatgctgattcatattatgactgaccttatcttctaataattttatatggaactaaaatgttaaaaaatgaaaatgtaaatcttctttgaccatttgataaataatgtatgcaatgttctgacaattagattgcttaaaattttcatatatgataatagattcacaatttaaatgtgatttgtaattgtacatgtcaataacttcaaacccaaacacataccttataaattttaactaaataattatataaaattataagtgtaatataagaaacacacttattgacttaagttcaacaatttagttcttaagggaggaatagagctattattcatttgctaaaattttacggaaaccccacttgataaaattaaattataatgattattggcaatatttaagaaaaattatctgcctttaatcattgcttagatcaataatcacttataatgattgagatttaaaaggaaaaaacttggaatgattgcaataaatcatatcaacagttcatgtaaaaagaaatgcacatatcaacagttcaacatactgttatgagtttttttacgatgtcacaattgaattcatgttgaatgctttgttttgtctaaccacaatttttgttgaatatgcagcccattacaacacatgtatatttgctaaaagcctataactgaaaacatgcttatgaaatgcaatatggaatgtgtacctgagctatggttcataagaggtcctagtggaattgaagtgctttctgggaaaatttccaattgattagcttcaaaatgaggattcaaaaactgttgatgttgctcatattgaatgattttatctaattcttgtttttgatcctggtgtgcaagtggataattcggataattcgtaacaggtggtgatgggacaatatcctcaactagttgatctagttgattgcaatcttttatcttcaacactttcagttgaggtaggcctcgaacagtattggctgagaagacatactttaattctctacatccacttactatcacttcttgaagattctggaagattgtggattgaacatgactttgagcaatagcatgcgtgaagaaagatgtcaactgtggacaattacttaaatacagcttctctaatttctcaagagggccagtaggaggtatacaaccgtgccataaaacttttaattgatccatcttgtatattttcagcttaagcaacttggagaagagaattcccacctcactcaaatgattgctagtgtcaaccaaacactctatctccttagaattacatatctcgagcttcttcaactcatgaatatctcctttttccaattgaaatataccagggattatattttttgcacctccctgagtatttgctatgaatataacctttgctgtttttgccaaatcgttaatcgccttatttgatatgtgaaaacagctaagcattagagttcttttaggggagataaaatttgcatcatcatcatcatcatcatcatcatcatcatggcattggcttcctaattttattgtataccattgcagttcttggggacactaaaggtgttaaagtatttaatggtgttttcattgtaaacattccattcttgctgtctattaatgatgctcaattcttctagccgtgggattctcctgaccacatcaaaattattcgtctccatgtcacatttatataacattaacgatttcaagttggttagttgtgcaactacaccatcattttgtaattcaaggaatgaaggcaaataacaatcagacaatgcaaggcactcaagtttcttcatatcacttataaatgagatgtcacttaattcccaattgctaaggattagacaacgaagttttttcaatgttttaaatgtcattgttgacaatggtagtttgtgcccccctccattttcaagatacataactctgagattttccattcttctgaaaatttcatctgatatttccaattttgtttctatgcaaagaaactcaagattggaacagtccaaatcatttggaaatttcacacaccatagatatcttactgaattttgctccaaagttacatccttctccaattcgcacttaatgagcttatcctcattctttgctatcaagtgggctacatcgcgatgaaagtcgtgcattttgacacatccatgatatgcatgcaacaataaacaagaactcaagagcttaattgtggctgcaatcacttcactctttgcctcttcatatgagcgaacttccccaactacacctaaccctattgcgcatcttgttaaaatttcagttggaagttcataatcttcagggaatacagaacacaacaagaaaagtgttttggcttcttcactatccaaattatcgtagctcaattgcaagcatttgtagggatcttgcaaacctttttcaatattcatcggcttagatctttttaatctacccaatgcaaccctccattccacttcagccttgcctttcaaagtgctagcaacagctgcaatggcaacaggcagccctttacattcatttgaaattaatcttgccaaatgctttacagtatcaggggtgccttctgttataagtgctttctcctggaaaagagcccacgcttcttcactagttaagattggcaagtgaatctttctttggcaatccattgaagtacaaactgcttctgatctagtggtaatgagaaccttcaaacctttatggtgttcaaaaagggaatccctatggcaccaaaatcaagcttctcccacacatcatccaaaatcattagaagcttattttcttcggttaatctcatgaataagcgttgggctctctccctttctcccgtttcattttctggaaacccataccccaatgaactagcaatttttgcttggatccttcgaacctctactgtactagacacaggcacaaaaagcactttgtcaaaaagaccctctgcttttgctatcttttcaactttcattcctaacgtggttttaccacaacccgccatcccatacaatccaatcatgacaacctcattatctttcagtgcttccattagtttctcgtaagcagattctctactgtcaaaatccatacatttttccgagagaatatcaagtgtgctagaaggaagtgtagtagtgcgttcaatttgaatatatggtccacctttttgaacgagcttttcaaggtccctagttttatttgctaacttctttcctacacagtatcgccaaatccaattcggagagtgcccaaaacaacaacttttttttgttcttgcctctttcagcaactgattcacattgtctacgtcattctcagcatcctgcagccactggttaacaacttcagcaggcgttctcgtttgtttcttggcatgtgcaacaaatttttggacatcatttttcgttacaatcaaattgcgctcttctttctcaagctcttcaatcaaactgttaaaacaacaaggataacgtaattgatttattgctccacacactaaatctcttgaaatagaagatgcaaaaccgtaaaggcattccatcaatttgctccactaaatgcaactttctttaacctgaacaaaaaagatgaacatcctacgtagtaagtttataattaattataaaaataaattatgtatatacatattgaacatatacttattagataaaaatgattttaagataatttattttgtttacaactttatctaaaaatcacttttatagtacaaaaaagaagttatggagttagttgtagtgattagttttaatgttttatatttaaaagatttaaatattttggagatccttgaaatatacttgaattttgtaaatgattcctgaaaaaaaattacttctcattgagtccctaaaacttcaaaagttttgtggaagatacatatcgttagtctccgtctaaaacgtgatgacgtgtccgttagttggacacgtcagcgatacacataagaattggtcaagtcagacctccaaacgaatgaactgttgacatccaaacgcgtgaactacaccatctcctcctccttcgccaccctcttcgccaccgtcaatggcttcctcacctccccctccttccatgactccaccggcaccgtcctcccctcctccctcccaacctactcccccctcctcggctagttccccgctcgtttctagcaatggctttaccattgcatgagatcctagtccttcaatgaaatttattagtataatttcttataccgtatgggtatctgactgagccgaatgctcataaatatccctagtaatatttttaggacattaaagcatatctcttctaaagtactcaagtatttggttaggtcgaatactcttatcaccttttcacccaaggtgatctctctgcataagtactcaggtgttcgattaggccgaatacccgagtactctaaatcaccttgtcacccaaggtgatctctctacataagtattcaagtgttcggctaggcaaaatacgctaatctccttgtcacccaaggtgatctctctacataagtacttaggtggtcgactatgtcgaactcctgagtactctcatcatcttgtcacccatgataatctctctacataagtaccctggtgtttggcttagccaaacacccgattactctcgttacaatgttgtctgaaaggggtccctgtatgtagtcaagtactcagacctagtcgaacacctaagctcccttgttacttatttggaaataaaatgtctagtttattctaaataatagtaattaaggattaatttaatcccttaatgatgattagaggaacattacctataaaggtaaccatgtgtaagagtccatggatcgacctactaagttatgtataaataattacgtgaatatcaagataaggacattattcattttcatttaatacacttgtttattactctcaatcgagaccttacttaagggttggagtatcttttgttgatatcccacccttcgaattattgattattatattgtgaaagaaagagattctcaagaagaagacatagggaagaaagttacctatttcatgcaggtacatttctattataattttttaaaaggaactaattaaaaaaaaaaaacaaattattgcaaagactaaaacaaataaaactgatgtattagtggggggaaaaataacacaaaataaggaccaaatccaagaaaagaaattttcaaggatgaaaagtaaaaataaaaataaaaattagagactaaaagtaaaaaaaaaaaaaaaagttatatcttaaagataaaaacatatttaagtcaaaataataataataaaaaatacgcatgttttatattttttgcattggcaggattcaaagatgagtctttccataggctctgaataagttgttcttataagctatttaaaaacattttataaacctgtcataagatgttaacataagataagttcaaataagcttttaaatgggcctaaatctaaccagagcaataacatggatttcattaaaaataggaattaaataaaaaagttatacagaacaaaatcaaaattagcttatttatcaaagataaaaatatacttaagctaattattatactaaaagagcaagtcttggtcatttttttatatatacctttctctaatttgattttatcttttcgaaaaaaccagttatagtattgctaaaacaaatattggttctctcaattttattttatttgtatttataagaatcaatagatattagaaaagtctgctcttatttttaaaatcagacgagtcaatttgactgagaatcgagttagtatctaattagttaattataaaagatggatcattgcgaaacttgtgagaaccaataaatatccggttaaatagatccaaaactagtaaaaatcaataaaaaaaatcatgtaaaaatagggttgaacctatatttttatgtttattttacatttgactaaaacaattttaagataaatggaaacatatatttaaaaaacacagcaaatataaattgtttcactaattattaatattttatttataaaacatataattcagtcatttatattagtttatcatttttataattttatattatattaatttatcattttcttttttattttatatgaaacttatcattattaatggacacatattttattaaaacttaaactaagtattatgtatagaaaattcatatccacttgttcttgtttttattttatctataggtaccaaagaattagcagatttagtagccctggggggaaggagcattgatttggattttggactgaacatgtcatccatgcaaataggaaatgagcaaaaatacgtaagcttacctctcctcttacagaagattcaaggaattgagttatatgcagagattggtgagaaacaagtgtagatcgatgactttacaagcaagagacggtgaaattaatctaggacagttgcgttacgccacaaacatatatatgatctgcagactcccaaaggaaattattatattagaatacagaaaccgcaaaaattgcaaattaaacaacttgctgccatatttttaatatatacaccaccttcagagatgaattccattgctcgaatctccaaagaaacaagagaataagagaatcctcactcacgctccactgctgcaaagacgattgctagcactactattcccacacgatcaactaatcattcattttaaaaaagccaagtcttgggtcttttgtcttattcatgctataaaagctttagtcttggtctttttttttttttttcacgagttattattatctacttttattattgttatctagtcgtcattgtcaatgactcattcacttgtcctgattgctcccttagttttgggggcaataacgagtaattaacaacataacaggttaaaatcagaagtgcccaataaatttcatgttgtactcactttttctaagcgtattattttgttgatttttattttaatgttctccttatatacgtgtttggtttaggagaaaaaaaaaagtgtatctaatttatttttacgaacacccttccttttttaaaagatgtagtaatagaagcctaaatttcatgttgtagtaagttaaccatcgaacgtcattctctactttattcattcaaagagcatcattttgttccaaggaaggtgataatgaactcaaaataggaacttggaatcttaagaggataccgtgatcaccaaatacattgcaaatcacagagaaaggggatggaatttgctagtcatatactcaggtaatctaagaaagtactagaatctcacactactaaagagttatacaagggactctcaactccctccctccctagattagtagattatatattattatgatcaatttacctccttctgatcaattaaagcattgtaagttacaacttacaacactaaaatccgcagttgcattttgaaattttatcacatcttaaatgtttttttttttcatttttcaaatttaattttcagattgtcaaatttaactacctgtataaataaattattaaaataaaatttaacagagacaaatggagagtatacttagaataacaaggagtacaaaaagaaactccctaattgttttatgttgcaaagtttaattatacaaaagattataagttaagtccaatattgaagactctttcttttcttgttcttatccatataactaagttctgagttgtgacgcactgaggaggacacactcaacctttcgactttatcttccatacttttaagatattcttgttcttctaccagactctattaattttgtatacataatagcggtgcaaagccaaatataatttgatcatcatcattttttatttattgaacggttgaaatcaaatttataacatattcttcattttttatttatttttttaaaaaaaatccagccttcttagtttttataaacctcgctttttgttttttaaatattcgttttaaacacgaggaaaattgctaatcatttgtaaatgatatgtttagaatgtgatggaattcaagattcatttcatagttttctaactcctgacgtttctttttagatttttaaaaattataattttcttaagaaaataaataacgaaaactaattattatttttgttgaaaaatgttattccaaataagtattaaaagaatgcaaatactgggccttatttctatttcactcagttgcttcattgactcctattagctatttgcaccttgactaatgcaatttcggaacctttcgcttcgagtatttttttccgggacataatacaataggtgtttcaagctctatgtggaaaaagaaacgtagaaaaccaagctacgtgaaaatattgcagcatacaataccagaaacaaaacactcatcatgaatagcacagtagttgcacaagactttcatttcagtaaacaattaataacatagtagcctccgaaagatgataaatttggtcctttaaaaaagcaataaacaatgaaaatcctgaagactcgagggatttctagcagcgatgggattgtgctcaaattggctacacagagcccaccatttataagcgaaataattcttaccgaactttgctttgatcttccaccatttttctcacattttcaagctcctttttgtaccctatagtttctgcaatgcatttcttcttttactctctcagagatgataaggcggcctcacagtctttcatttcttccttcaatctaatgaaccgttccttcaaaacttgttccttctgttgagcttcatccatgaatgtccctgcctcggatatttttgaaacgagtaatggctacctcgtcctcattccaatgagcttcaagcactgccaacttgtcagtggtagcaaagccttgcttgaaggaacatagaatgcttgggaactctctgtgcctggtgtctataatatcttcaagtccatctgatagagttgcatctttgaaaggaaggttggacaagaaattaagtcttttgccataattttgtgagatcctccattttgtgacactaaagagcgtccacaaacattgcaaataaaaggcagtttggaattgcttaaaaagttcctctgcttctattttttacaagcagagaggtcacagacaatggtaatctccaagtttaactaaagcaaggtatcttaattacttcccgtaagatcccaatatatttggtgcgatggatgctatttcacaccggttttgcttactttgtgttataaggtgttatatcaatattacttccagttctttttcttgcattgtagataatctcttagtactctctttacttattttcagttttacacgatgctcttattcttgttttaagagttttgtccctgatgaatttggtttttatacaaatcttcctttttgttttttacaaagcaaggactgtataatgtatactttatctgtatactaatattgaaaaaggaattaggcatccccctccctctttggctttttataaagtgaaaagcctaactatatcactttttgtttctcaatcaaactacaaattgtacataaaaatccgggagctacaaagtgatttcacatcagaagacaagaagagaacaaccaagttatggttgatggtaaactaatctaacaataatatacacgagaattaaaattacactagagcaatacagtttttaacacattgacacatacatttagacatttaacactagaaaactggtacaaccataaagatggtttcaatttctgaatggttagcagcaagccagcaacactggtctttgagttgcaggtttttcacaaactctttctggtgccatcgtaacttgtgtcttgctattgagactccaattattcaaaactctagcataagttgaatccatttttagagttatctaatatgatatatatattccaacagtttgaaaatctcatgacttctttgtgttagttcctctgctgatgattagctggaattggaaattgccttggggttctgctgatgtcacgtgcaatctcaatgcaagcttgatcaaccaatccccagaaattcttgactatgacaaatagttgactattgttttctgcaatctcttttgaagctccaccttgataatattgtgttactttactaagagtaatgagactgaattacgcaaactatattcccctactctctgttcatctgaagcaacattgttctcggactatccaacatatataagctaagaatgacaatcttgtatcaaatagaaatttacaaaagccagtgactatatattatgacattaacaaatgatcatcaatgcatgcatgactcagttttagtcttttagaagcaaaatcttgattctcgagtattcacgtgaactcttgtgctttatatctggcatgaaaataatctgtaacacatataacatcaataaccattaagtcactgtcatgcttctaaaataaatcaaattgccaaaataaaatatgccagtagttttgttagcacagacttatgctaataaactcatgcatggttgcagcttttaccttaaaaagtaacattgctgcagcctgcaggcatcctatggtttgattgatgaacatagtgtatatatcatgtaatactcttatcccttgaactcacgtaaacaatatatgcctcgggtttgatcatctgagtgatagaatgatacatctgagtttgtaagctgattgattaatgtatcctataagctaacacaatgacagaatgatacatctgagtttatattgaccattgaccgcagtcattgccaaatttgaacattgtcatatcagcatgtaaggtggtaggtccattttgattgtagggtctagtatagctcctctgaaacttttgaacattgtcatgtccatgtccatcctgtgaccccattaccgttgaaatagttggcactaactagaatacatactttcatatccattctactggcactagttagaacaaacacgtgtaacttcatcaaatgaatggatttcacgcccattttaggcacgtatgagtatgactgtacgaccaaatggactgcttgctggcactgccatagtttcaatagcaagaaagtgcccctcccacagcagttctgacaagttatgtcaagccaatcacgaggttgacaaattgaaaagtttgttatctaacatgtagatgtagcattataagtgtagtttcaataagagtaaacactagctttggtagtcatcactcaaaaaggttatcaacgttttagtactaagctcaacaatttgttttggaacccgttagtattcggttcggaaaaggaggatcagtgacatcaaattaacaattttctgcatacttgctcacttgcatacaatacaatacaataatcctcttaattcttcttttctctctttaaagttgttggatttaaaattgatttcagcctttaattgaatgaattctttaccaaccagtaaaaactggtcggaaatagagttacaagcaggcaatctgtcctgacctctctcacaagagttacagagaagaaactttaccaaacaagcaatcactagatcttaaagtctaccagacaaatgttacaaaataaaatttcaccttctaaaacatccgttgttaatatctcattggtctctaaccaagagagacatagtgtacagttaaatctaaaatactctgggaagaatgctaaagcacaacccaaataattgttttcactattgcataacctacaaagcatttggttctgtagcagcatgaagaagctcatctggagttgcagccggatcaaggtcccaacacctttcaggcaaattgctagcctcccccttcagcaaccaagaaggcacttgatgtgaaaagcgcaacatctctcttctgggtatccattttatggcactcttgtctgtattactctgatatactgttttaaatccagctaacttaataagaggactaacacaaacaccaagttcctccgagtaatcatccagcacctcaaccatttcatactgatgcctcacttcatctggagtagatctgttccaatccgacgaccaatttcgatacacagcccaaatatctccacttctaggatatattcggacgcaaccacctcgagcagccttctccttacttagaacatgagaaaatatgttaacttgatcaacagcatctgaattaaaagccctgaaatttccacaagatttggtaaaacctgaatcaagccagtttactgagccaaactcactatcagttttggaactcaagtaactgatgtgaatcttaaatggattgacagacacaacctcacggatcatacaatacaaccgtggcattccatcttcctcatcatacaaggcccatatttgctttggcctgaagcattcctctgacctatctttgtcaaagtcatgaaagtcagaatctgggacagtaattgacattggaccagttttcccattctctaactgtagaccagaaacattcagagctgcttttctacatgtctctcttcttacttgaccaacttcagcttgtgatttttctctctcattcagagctgcagctactgctgctgctgttgcttcagatgacaacttcatctcctccagtttcttcctgatttctttcctggctttctcaatcaacaattttctcgcgtcaaaggccggtgccatgtaacattgtttggtttgaacttcaactgtgcaggaaggcttttggcattgtcccatgctatcatttccgttagccactatcaactctgaagcacgttttgaacccttttcttcatagccatttctgaaactggctcccacaacaactttctgtttcttgtcaggtctaattagtttatcttcctgtggttcactacaggagaatattatgtctgaatttgtattgaccatagtctctaccatgtgatgtctcttatcagctcctgacttgacttttggtcttcccctcttcacatttccattggcctgatgaacagaatcagcaggtaaggtagctgatccattttggttgacaactccagcagagccccactgaaatgaaacattggggacgtactcatatccatgtccagaatggtatcctgtgaccccattcccattgaaatagggggcactagttggaacatatgtaactccatcaaatgaatgacttccatacccatttcctgctacatatgaccaaggacaatatggaaacgaaccatttgctggggccgccccagtttcaacagcaacaaaagtgccacgacagttcttacaagagagtcttttattcacatacttgcgcagatactcatactgaaccttacaagaggtgcagattgtccaaaaggtgtcaagcccaccacgaggggttgacaaattggaatatttgttataacctgcggcccctttagcatgggcaggagacaaattcgtctggttagtcccacccaactgcacatttctcttgagatcataagaactgcgcatagcactatctgatagccaagtccaagcctcagaaacaagcttaaatgcctcatcagctcccacacatttgttcttatctgggtgaagcaacaccgccaacttcttgtactgtttttttacagcctccttatctgcaaaaggttttaatccaagaatcgaatagtaatctagctcaccattatgtttgacctcagaagcaatgtaaacttcaaatgtggccaccatttgagatataccctccaatcctggacagagagttttagcctttacagcatagtttttagcaccggcaaagtctctcagagcaaagcgcttttcagcaatctctatcgctttaagtgcttcctccttgtttgcttccatgtaggaacaaaagatcacttcacaactgaactcttgaaacagaaactacgaccagcccaacatcttttccaatatcatacataacctcgtttccatctctgcaaaagttttgaaacaaaaaaaaaccaagtaagtaattttaattttaaaactcacaaaactttcatctgagatccaaaaacaccaactcaaacattttcacaaaattaaacagacatttgccaacatcaatctagaacttatgctccctattgttaccgagaaaccaagaaccctccatctcaaatacgccaaaaatgtggaataaaacgaacagatcgtggcatttagttgattgaaacacaatttttgaattttccacataaagcattaaactttactttccagtctatttcctaaatcttccaatttcaaaatcaataaaacattaatcaacgggtagaggtgacccatctttcaatcagcacccaattcacccaaatttgacaaaacctaaaacttttgcgcatagatcgaaagtcttaagactaaaacccccaaaatttatactcataatttaaattaattcggaaaaaaaaaggcagatgcaataaaaataatcacaacaattaaaaaaaaaaaaaaaactaactgagattggagacgataatggggtgttgaagaagagccagatcgacacgtgtagttacgagatgaagcaaaattgtgtgtgaatctcgcttcgctaaaaacaggaaaacacagaacccgatttgtatggacacagtggtgtgtggtaaatggtaaaggtgaagcctttgctatggaaaaacaaaaactgtgaagaaaggattcgggtggctctcggatccgaagtgggtccgattcggcgcaaggtggcggcgatgaataggagcttccgacaatcgccgatcagaaagagaagagaccaaaataaaaataggaattattataaataaaatgatgataattttcagagcaagtaaacgctgttattactgaggtggttggaacaagctaacgtgcaccgtaggtgcgtaatgactaaagactgcatagcaaatttattattatttattatttctttttaagaaaaaaagaaaaaaagaaaactactaatactttcttttgttttatgtttcgcattttttttattgcatcttaaatttagtttaaacttatatattttgcggaagttggaagttagagactgtgttctgtagttggtgtgaggttggatgatgatttggagaattatcagtgatgggcattgggcacttgtgaatgctccacattgattattttatattttatttttaaaaacaacaaaattatttaatattttcccatcttataaaaaaagagaattaatataagatattataaaactatttaaaataacccactagtctaatgatgcaagatttaatataacatttttatttttgacagttaataaagataatttaatcaattcaatcttataaataaaaatgaagagagtattaaattcaaatttgattggtattattgtagacattttaattggttagcattaaatacgtatttatggagtcataaatgactgtataaatgtaataattggaattgggtgtataatctatctacttttattttagtaatctaaacttcctttttttgtgtgtgcttgacttactactttcttacacacaaaaaagaaagactttatttcttcttcttttttggatgcaacatttttaaccattttatttcacttgggtttacaatttttaaccagtttggtgcgattgaacttgcaattttttaggttgagttctacttaaacttctgagttctgacatcgatttcaagttgtcaatgtcaaataatttggacttaaccagcaaaaatatggggtctctgaaatatttatttgggctaacggggaaggcccaatgacattcgtctctgaaagtaacaaccaaattaatgtaatgtggtgaccaaaaaaatattaatgtaatgaaggaccaaaacaatattaatgtatcggttgaaacttgaaatgaaatgatgttgagtacagaatcaaacggacaacagttgaatcttgaaaaatctggttctgccaaaaattgaagtggttggattggatgcatactttgagtcaatgatcacagtaacatgtttgtttgtccactgggttgattgtgtttgctctgtctcaatcaataagaaggacacttgttttttttctttttcgtattcttcaacactactcatactgtaaaataatcttttacggaggtgaattaaattaatcaacgaaggagatggaagttttgattttgacatttgaaaattttgtgctaccccgccatttcaaaaatagactattcagcaaagaatttttcaccttgatttgcccgtcttattgaatatgattatctagtaaaaatttgacgtgatatcatattttttccatgattgatatcattaaaatattacactttatgcccgctttgtatccgttttagagtattgtattgtagaatttgctaattacaaatattctcaacagttcaataagtttatatatttgaatgtctcatcagtaaaaaaaaatagtatcatctttgttttttgttttgtttttttttaagatggtatcatctttgtttttacttatatcaaaaactgaattttttctatgattgtctcaaaattatatgcttattaacttactcaaaattaaagcttagtctttgatagtttccgtgaaagttaagaagattcgctagccatgggctttagtgcacttaggtttgtttttctatttaaaaaacttggctatagaataagcttttaaatatgcctttaaattaggttgaacttttataaaagttgtacaaaaacttaaaagactaatatcaaagtaaataaatcatgttctttatttgaaaatacatttggtatatatgactggtagattcgaagacaaaaattgaagtttttatagtgacatataaattaggtgtatttctagctaactttatatatatttgtatctattcagtaaaaaaaatatttgtatctattttaatgtcagtttagttttaacaattataaatttataataatagatcatatcagtaaatatttaataatttgataaattttttggaacaaatttttacaataatacacgagtgagagaaattaaaaagaagaaaaacatatatagaaggaatggtgtaataaaaagagataaaataaaaaaagtgaaagtgtacgtaaaattatggtaaaattttgttatagaaataacattactcttttgagagaagagagggggggggggggggggggggaacacattgttactgaaaaagttaaaaagtgaattatctctgggcctttggagtgtacgaataacactttttttttttgtgaattacgaataacacttctaaactgggctatagctcccaattactgtaataaattataaatagttaatagaatatcaacggtacttcccaatttaaggaagcaaggagggcaactaaaaaaaagaaaaaaggaaaaggttactggcaaaatcaaattaaagaaaaataaataattttaaatcctcaaacttcattcttctacaaatttatctactatcttttgtggtaagtttttatatttttaagatattaaatattttatttttattcaatacttactataaaaactagtaagatgatgaagttggatgatataaaacattactcaagaaaaaaatggaggacgatgataggaagtaataaagcaaagtttaaaatagagtactagttcaactaattaaaccttggttaacaaaatcaattgattgtcaaatgaactacctagcttcatatacacaaataaaagataaagacccattcatcactgatccacgcttatcacaactttttattgatatgtgcattaagatataagattgatatagtgatggaagaagaagataaaaaatagttaacaactttaaatttatgagtaataacaactaataatactaatcattaatatttgctgataaaaaattctattataatataatataacaaaaatatgaggaaattaagagatgagaataaacaaacaaattggtgatattttaatttggtatatggtagacaaatcaataccggggcagtacgtgcttcttatttcctgggcaaggcagggaccaagatttgattattattttttttttttttttggtaagatatcaaaggaataatgagaaatggtggaaaaatgagagatgatgagatcagacgttgacagtgttgcagaggaacatgagggacgatgcggacgcgtcgctggggatccttccactcccgagcctctcgtagctgtcaatgcaaaacaaggagagcgagagctgcacctcgtgccgagtccacactcgcttcctcacccgctccgagtttccgagtcgactcagcaccggtctcacgcacaccatgtacagccgcttgtacccgcccagcgctaccaccaccgccctcaccgacgccggcggcggtgaggatacgtggcggaagcacaggtgctcccacagcgagtcgtcgttgcgcgtgaggctgcaccacagtcgacacacgcacgccgccacgcccagcgagggaccgtcgaggcgtttaaggatttcccggagaatgtcaatgttgtcgtttatgaagaaccgatgtcgtttctcttgctctccgcggtgctgctgctgcaccatagttgcggacatgcacgatattattcacagagagaggaaaagagaaagagaagatttatctagctagctagtggaagtggaatggttggtttaagaagaaagtgtggcatgtgaaagatggagcagcataaatgtggggtaacaatattaggtttcttgcagtgaaactgtatttggattctctagataaagtcccaagttttaatatataataaatataattatatagggaaaattttattaagagatcaaatttcattaaaaataattaaatatatttttaacaaaagattaattatcgacaaaaaaaattacaaaatgtttttggagaaaaatattcatgaataccctattatatatctaatgtgagaaaaagaaaaagaaattaaatattataaggattatgatgtaatatgaaaaagagaaacaaagaaaaattataaatattaactaaatgtttaaaaagtgagcataagtgtgtgggggagggtggggttttaagtgtgagaagagaagtatattttgactttttggggaaagaattaatgaataataaacgtgaacttgtgaagggagagaccgtttacatttgttactacgttggattgttgtttgttgttgtggttggacttgttgttgtgcatgtagagagagaaggttaattgtgagtatcgaggggagagaaggggccaaaaggaagttccaaattaaccaaagaactggaaccaatgcggtgcttttttcctcttgttgcttttctatataggtttcggggtgagcagatttggtgtttgttgtttttgttgttgtttgcattcttttccaataccttgtatcaattgaggaccgttgcggatcagagagagaagaaattgagttcgctaactttgaatttttctatatatgcttcgtcgtgctgttgcatgattaattgtcacccagtctatgcagacgttttgtgtttttttttctggacgagactttggaccatatattttttttcatttttcaaaataaagtagtataaagaggttaaattcaagtatactcaagtgtgaatttgaggcttcctacctttctatggggccatgccatgcctgtttcatcaccaaaaattgatctatcagttcagcctacaagtctaaaaattgggaaacctataaaccagaagcctcccacttgaataagtatgttggcatatcttattattgagtgtgttccatttcatagtagaaagcattgatcttgaattccgttaaacttaatttagtaaaaatataaatgtttgaatatattgttggataaaactatttttactttgattaaaatcctggtttgactaagaatgtgtttggttacacattatgcatgcatatctaatgaaattgtgtcatatacaaataaatgaaatgacgcgtatcctatgtttggttaggcgttgcaaccacatcaaatgaaaaatttagcattctgagacaaaaaagccaaagtaatacctaaattgcttctgcattgcgttatatccaatgttatcacagatacacacttaaaaaattataatttatagttattagaaagtcttaaacaatgtagttataattatgaatgcatgttatctaataaaattatttcaaatataaataaacgaggtagaagtaataatttgtaatttccttctaggtgtggaacttcacgtgcactaaaagtgataggaaatagtttttgttttgagttgaaaaatttatattaatttttacagcaaatttgtttttagtttaaaagaatctaaatataaattatttttacttgaaaatcaattttaattaaaatttattttacaaacactcatctaaacataaaatattattagtcaaaaatatattcttagctagacgtagtgttatgttatgtatgatttttaaattaagtaattaataaatttattatatatgacaaattattataaaataattataaaatcattttatattattaatttatcgactattttacctttatattattgtactatctttcatttaatatattatgtggtaaaaaatgttaaattatatttattcttctttattagttgaaaatataataaaaaataatatacaaatatcattaatatgttgactattatttgcatatatataccactgcaaagttggatatatatatatatatatatatatatatatatatatatatacacatacatatacacgtgaatagctggcatatatatatatatatatatacacatacatatacacgtgaatagctggcaagtgcgctgataaggttgaaaactctacattcatgcgatgcatgactagtaactaggtacaatatctagcaagagttgacctccatgtcaatgatcagacctcgatctatataattttgtaacattgtttccctttcctacgctccaagcaaaactttggattccaacagttttcaagatttgcttaaattatctttttaatttgacttataccttggactgattctaccaaatgtttcatttaattataaaaacaaagatacaactgatgcactgatgtaattttaaaatataaatatagtatgttctgtttttttttaatgaatcagatatcccttttccgaatctcaaggatcaaaatacttaaatctggaattaatttctttcaatatatttttttaacttaaatacatttttttatgcaatttaatcatttttttagttatatacttataattttttcaatttaatctttacaaaatatatttattttattttttcattcttaaaatgttttaaataacattttgaataataaaataaaaaattacaaaaataaaataaatactaaattttaggaaaaaatatatttatatttatattttttcatattcacatgttaagaatcaaacgcaagactatacatatttaaaggacaaaattattcattaatcatatcacatacagatgttggttggtctgctatgttcttatttcttgctaatgtttaattctcatgatatagaattaaaatgaattattttcttaatagctatgccataatttcctttctttttttattaaacttattataaaattcaaatcttaatgaatatgtaacgcaaaatgaggatatctttgtatttggcaagatgaactgcgttacttaattaattatttgatagaatatacattttaataatgatcattgacttgaacaactataatggtgatcgatgcaaataatataataatttgcttggatcaggaaattaagaaagatactctattaattaacttgaagacaataagatgaacttgtatttcccgttccaatcgagttggcatttgaacaccaaaacagtgcaattcagaaacagaaagagaacgcactggagcaagcagaagcagaaagaaatttttgctggtgaatggttagaataaataaatggaaaggaaaggaggatggatcatgttccaccaaagaagtgcctaaagtaatttccttccattgtgaggcacacgaatagaaaagtcacgctacagtaattttatgtttttgcacttgatgtggaatttgaatagcaacaaagaaagaaagcaagaaagaaaaaaggttttcagatgacatggtgaggcaatgtctcacggggttggattttctcccacaaagaaaagcaaaagccccaagtcctttgagacagaaagcataaaatataatttcatttagttagggtagggggggcttgaaattgacatttgatttattaattaggcttctgtggagagagactggaccccactcactcagtgctgcaatattagagagtgtgtcataagaggttgtttttattaggttggacttgttcgttggacacactcgaggggtagcactgttccctattcttgctcttagcaactcgataactgcaaaactacaaggagatggccgtaaagtaaagtttgcaaccaaaaatattttcaccgatattttttttcttttcttttcttccccaacaactatcctttgtactttgttcttgtaaggttttgcccacatactaattggtcaactagctagtatatgatcagagattctaccattgtcatgaccatacgtcaacatagagcagagttcaattatagagccaatcatctgtgaactgtggtccactgttaatgtgattatacaatctcatcttctcacttacctttctcctgtattcgtttcttgttttctttatcgtttaattaggactttctgatcgatcctacaaattattgttgtagatagatcatgtaacatatataccggctaacccaaacattagttaagatgaatattttatacataaatcataaaaatattttaatggctataaagaatagtcatgtgatgcttaaaatacaaagaaaaggtcaaaatggtatattcacatcttcttttttcccaatcgggcgcttctttggttaaaagtgaagtatacctcaattgtagttcacttactaaatttgattattcctataattataagactttaataaagagatattaaagtaattaattattataaaattcaacaatttcctattatattatacgtcaaccaataatttgataatttattttaattaaattataatttagaggtttgataaacgaaaaagaatctcactctaattccacttctctcccaagtaattatttttttcatttttcaattaaacaaacatatagaaacgatacacgttaagttttcaaaatcgctcgaaaatagcaggatttctatcaaactaaagttgtttatttttaaaattactaaactagtgtagtttatttacaaaaaaaaaaaaatcaatatgggtaagtcttgcttatattatttatttattttttaccaaatgccaaaaacatttatgactgtccaaaattaacagacattactattataaactgtaaaaaaattgcataaaaagtttaaaaggaaaccatattcatgaagtgcgacttacttatgttatgtgggtaaatttttaaaaactacacttgtttagcaataattttaaaaacaaaatacactaatttggcaaaaagacaaaaacaaagatcgccactggatatcatgcctatttggctcaaaattagagtacgtccaattgggtatcactccttgtgtattactctcttcttttttttcttttgtctaaaagaataaagtattgtgtggttattaatggtgtatcaatattatactaggttataattaattagtgttagagaaaatatataatagcataataatgatttgtgatctcgcaattagcagaagtatgtagtgataaaagctttaaacaacatccacagaacaaacaaacaagcaagtaaaaggtaaacagaaagacgagggggaaagcaaacaatgcaatgacagccagggttctaaatcaacgctatctcctaactactctcttagctaggagtgggtaactgtggaatctgatctttattttgaaaatttagctaaatgggttgtgtttttcttcttgtgtctttgcttttgcatgggattgaggactgatttattaatttctcattattcattccctttgatcaaggggagggaagaaacttcctcaatctggacactaaattcctagcctgctatctatcacaaatcttgggtacgtgagtagtgaaaagctctgacaaaacaaggcatctttaaaacagtgatgttaagcataaaatcaaataactatgtggctcagaggatgccaacaagtcatacaagcacaagggaagaagttactattagtggatccaaaattaaacttttttaaccatcaaattattaattcattagtgttacattgtcccaagctgtccaaaaagagaggcagagttgttttgcgcgcattgcagcttattacatactactgtatgtactaatttatggtagttttaactttaagccctaatcattcaagctgatggaaagtggacaaaaagctgtgtttgtgtgaataaaaactgcaccaacagaaggggcagtgccaggacattattatatgaataaaaattgtgttggtaaggggggctgatatatgctaggaaattaccagctaagaggagatttacttgaattatttatgtcaaattttgtaaaagttggacaacaatacaaagaatagttcttattttcatttatttttaaaatttgaattaggttaattttgatgtgcatcaaaaagatcaaataatttcggtttgatctatatgatatatctttttaattcaattataagttttttgttgaaagtattcaatgaaatgttattgaataatgtaaaaataggtataactaatttgagtcaataggcaaaagaagagtgcaatttgcaaagcaagaacttgagcatgtgattttgggactttgtcacattagtccgaaacctattaaggtaagatgagagtttcttacttgttgttaggtctaagagttataatttatttgacgaattgtaatttttattgttagtttttttattttttggccaactttattttaataaattaatttaaaatattttatcttttatttttaaaatattacaaattttatttttttcccgttaaattgacgtaacatgctaaaataattttactttttattcttaattttttactttttagttaattttgcttcaaacttgtttactttttagtgaattttaaccaaaacttttatacttatgtttcccctaattacacttatgttaattgttaactcaacaactaaaattcttggtaatttctctctttctctccctccctcaaaattttgacttgttttgattcttgtgtttgctatatctgtgtttccaatttatacccctttgattgtgagtgttttctctgttcaagccagccaacaaacttgataatttataatcatataatgataaagagtaaactaatgttagaatcaaataaaaatgttagtatttttcttcctctgattctagctccgcacacacagtacgctcactcaccacactcattggccattattaactaattgaaaccaccagatgtagtaggaagattgagattagttacttgttcgtttggatttttatccacacaatttggatgtacatccaagaaacaactagtagtgcgtgtttggaatttggttaagaggaaaggaattatgtttagattgtgaaagttataattgttaacttttgacattggagacttgaaaaattacatttaaaaccgtgaaaccaaacaagctttgatacaatttcatgtgaaatttttgtgaaaggtgaatgagtgattaggatccaaacatgtacttagtttgaatgatgtgataagaagaaaaaaaaaaaaaaaacaaagtgatttatacttgcagacacttccaccaatcatattaattatttttgtctcctcctctcatctcttttaaggttagagcatctttagtggtagatcttaaattgagatcttagactactttttggtagaccatataatactaaataggattaaagatctcttaaaatctctttcatttttttatttaatggtagatctcattttgagatcttaaggagagagaaaaatgaagaaaaattattttttttaaacaatgtgtagatcttaagagatcttccacaagacctcatctttcatgatggagatctcttcaattcctttattgggagatctaatgaagatcagatcttaagctcaagatctttgcttaagatcttgcactaaagatgctttaagtgacttttaatttaaagtgttccaaccacattctttcaaataaaaattcttcagtattaacaaattcttgataaaatgatattttacaattaagttaatatggttgagagatgttttattaaacgtgatcaattatattttttaacgaaaattaattattaataataaatactttacattaatgtcatggtgagaagaagaatgatattttactgttaagttaataatcattggcaattagtttagttttattcacttggtaattgaatttgaaaagtcaaatgctattgaatagtgtatgagagacgacagtgagacaggagggtaatttggactttggacatcttcatttgggccaaatgatgaggcccacaggctattacaatacgtgaatgttggaccacacagtccacaaatccaaagcatcctaaggtgggttgcgctaaaagtagaaacagagaaagttgctgagcacgtgtggctggcttggatagaaagaacattagaatttagaactagtagttgtgattcagtgcagaagaagctgcttaacataaatgggatttagaattagcggttcctcctcttcatcatgcttttctttgcaacgtacgcttcttcctccgttaacagcgatagccacttctactcgtgccttgaggatgaggaggagtaattgcataccaagttgttcagtatcttatcaaaagtttgttgagtttgctttggatgaaaccaaacgccacactcacttgatcccttcgcctttacaggtttctcttattcctttttttttttcttaaaaaattatggccattttcctgtatgtgttggactttgaatggttgattaggattagttagttccattctggtattgaatcccaagccaatgtgaaatttccgctttgtagttttttaaaacttaatttgcagaattcttcaaaccaaatttaggcagtgtttggtatatgtgtcagctgaaacggacaaaacataatatgtgaattttccttttatgttgcatttaaaaatacaacaggacttaaaagttgaaacaaatgcacattggggttctatagaatgtgtgaaatcaaggagaactgagcgaaatgcaatatttcattatgttttgtccatataccaaatgcaaccttaccttactgatgcatctgtacataatcgaagcaaattttgataaaatactttttttcttttttagatgaaagagttatatgttaggcctttttgccaacatatgtgacctttttgctttataaaaactaatttaaaaaaaaaaaactacgtaccctattgtccggagactccacgctatgcgcagatagggggtgggatattgtacacagctttacccttgcatatgcaaagaggttgtttccagattcgaactcatgaccaataagtcaccaagacacaactttataaaaactaataactaataattttttattggtaggcgtaaaactataactttagtagacttaccctttggccgaccctgaggaagaagagaaaaagaaattgaatgaacttctctatagaacaagttctctggttagtgctcaaaaccaagagattattaccatactttggatgacagtgtttaataaatataaatgaagtaaacaatcactttggtttggtcaatgtttaataaacatcttccatttattatggaagaaaaaacatgagatgaaaaagagttttattatgactaagtgtcatatcttgtccttttatatttttgtgttgccctgttgaggatgtggtgtactgttccaatcaccaagtttcagcttctcaggatagaactagctcttcaattaataagccgttaacttttattttcttgctgttattgagttattcaactttgtatttcgtttatattttgttatagtattattttaaatttagttttattgaacacataattgctttgaagattcttagttgtgaatttctgtccctagttgttcccgactcctctgctttgttcgcttaatttgctctccaccattatttgtgtgcatagatcttcaatctacatttttgtatgttgtcttgctaggaaaagttcagtttcatgaattccaaggatgttaaaggaagtcttagtacgctatcatttgaagctgcaaaaattaggcttctacgaagtttgatcattgagactgaaacaatgcaggtgattttttttttatgcctatcaattatcaaattgatatatggttggtatctactactgtcttaacacaatatgcctttgtgtagtaccttgtaatttattacagcaataacaatttcaaaatttgactttgtctgtatttatttctgccaatttcagttttctttttcctttaccaataaaggatccttcatctataacaatgcatgttaacagaattagtaagcatcctgttgtatctgtttcaatatgcaatctctgatccccatgaggtataacacttgtcggaatatctcataacatcaatattatatcttggaatattttagagtatcttagaaattctcttaggattagcttatgtgatttctcagtttccattttcctaatgttttatattttgcaattctatttcaagttttcaacaacacaagaaaaaaattgacatgtcattgctgaaatgttctgctgtcttctgtgtcctgtctgtggaaaggttattttacaacatgcttactgcctctcttttttgtcttcaacttcttatgcaggttttggattttactgtctttccaaaagcagaatatgatgtccccatattttgtgctaactttttcacctctgctaaaacaaacattgttgtgttgtaagttagcatcttcttccactgttgcaatccacttatataaatgtacaaaggatgttcttctcatattttacttttagttgtggaaaagtctagcaatttgggctatgtttgcaatttttaaacttattcctaaactgcatttcagcttatggaaatttatgcatgggaatgcaatattttcccatccaaaaagaatttaccattaattatgaaaacctatcttgggttgctttgcaaatcaaagtaggaatcattcagttttaaattaaaaaaataagccagcctttgatctatgtgaatatatactttcaagaggtacacacaacagagaacttttatgtcttcatttgggtgtggtaaatgcatatgtttcattgcctactaatactcatcaaagtaggttatcaagtatcaactagtctcagtaacaggtattttattatacttggtaaaagaaaataccatatttcattaggtgtaaatttacttgcataatcacttgaagaggatgtttcattcttttgttaaataggttcatgtatcttttatggtatatttctcattgaataaaagcatgcatttccagaaaagaagattgattgtggaggaattgtccacacgatgaaccaaacggagcttgaggggaagagtgaagttatcattttaggagcagatgtcctagatctcaatgttagtttaagcaagagaaatagtagttgttttactccagccctttggttttgctatttttttttcctatgaaccttgaaaaagatgaagtatagccctaatcagctatttcattctctttaaaatgtgatcttgaaaccatagttcagtaaatttgctatatttgtcatcttaagatatcatatgtcatattctatgtaaaggagattttagcattgaaagcatctttggttgactacttgaaattacattatatgtaccaaaaatgtccttgttggccttcgcttttcattttcttatgtattatagctttacaataaaaaattagatctgaagttgatgtatgctttaatttgaatttgtaggcttttggaagaagattggtattgactcctcttcatccaatcttagaaagaactatttggtgaagctgttataataaatgagaaaaaaaaaatgcctttatcagtaaatacaaactcaaggatttaatgtgtgctgcatgtctactaaagttttccacctactcagatgtggaagaatattatagtgtcatcctttttgataatctactgttagccttcttatgttgcattacttatccctcaatttaattgtttttagtcatattgtcagtgcatgtactttatataatggtacttgggagtttatacttggccaaaataacataatgaaaaagaccatgctttacctagaaataaagcctaaagcaaatctatgtgacagtctgtagttctcatttctccccaatattgtttacaccttaatcgttttagaaatctaatatttgttcactgacatcattggtaatgcgaaaaagttttcccccactgtgctattgatagcttcaaacattttttaagaacaaattactgtatgtaatgcagagcactaaccttgaattaattatgtcagggaccttaaccccttgcatgatatcatcaatcagtatgagtacaaggagaagtactttaaaagcttaattcctcttggccttaaatatgctgaggtaactgcaaatattttagcgaaaattataagaattattggtagaagtattttcagtttagaaacagttaatcactcgactgcataacaatgtgcaaagttttgttaataacagctacttattgacctgattagccacatgagtgatgcattgttctaaaactggatatacttttaagttttaatacgaattctacattttttacttttccatttagtattgattcattaaaaaagtcctcatcatggatgcatctctgtttttctgtaaattatagaaattctttcttaaatgacctagtgtgttgacttaacaccgactttatgcagctttttccatggggagggaagctcacaagtgagtccataaattttttttcgccaattgtcatctggacaaagtttacctcaaacccacaaaaatatgatattttgtattctgcatttagggaatattacaaggtaataaccccagcattatggtcaacttcttgaatgactattcatattttgctaaatactccctccgttcctatatataagacctttcaactaattcactctctttaataaaattgattaatgtagtttgtgacattaaatttgtcaataatttatactattttcaaaattacccttaatattttttaaattaatcatctctccctttccacttaattttttcctccctcattaattaatttttggagatagagtaatgattatgtaacttgtggctactcatcttctccaatcataataagagaaagagtttatcttgttaatttccagcatatttttttttgctaaaaaatttgtagttaattaaggatattttaggaaaaaataattaatacaagagacaagtagaaaatggtcttataaaaaggtacaagaattttctgaaaatggtcttatatataggaatggagggagtataatatatttagtgaactttaataaaactgaccttgtacacgtgtaatttttttctcttgatgactgttaccctggcaggtatggttggaattgatatgcaaagcagttaaagagacagatgaatctcagatttcccacaatctcgaagcacaacatagatatctgacatggagagctgaaaaggtagttcacagttgctaaattttctgacagccaatcataaatatgattgctgatctagccataagcaaacttatatttgtcccaggtataattggtttaggattttctaattcaccaaggatctttactcatttagttagcatcggttgaagataatttagatgataatattaacaaagatggttatgctgaatttgatatcttcaaaaaagctacctaacttattgtttctagagtaatgtagaaagctattttctagcattcaaatctcaacaataaaattgtcaaataagtttggaataaattttgaacttcgaactatatagaatatataggacatgtttggataaacttatccaaaaacacttttaggtaaagaaaataagaaggaaaaatgaaaaagacttctccataatctatttctaattcagttttaccttttaatggacctggttcatggacatacttgaaattaggatccgggacaaggtgttttgaagaagctgattggtgacacacttgccaaggtaggccaaatttgtggtcgatttatttaattcctctacaacctagtaatacacatcctcacttcctgttttatactaggatatgttgagaagctttctctttaatggagtcgatgaacttggaagcaaaacattcaatgattattttccacagtactgctgtcaagagggaattctaaataaaaaaggcaatattattgggaagtcctttgaagatcgcccatggaatgctagaggagaatatattggtaacagattttcaaattggcttgtctagttgctgctttcttttcatctctgcttggtgtgttttttatcctgctcctctattatcattgtgtttatgttcttccatcagggtcctacaagtaaaaaaactatgctgtgacctgcattttcttcttttatacgaaaattggttctgcatatttatctatgacattttgcatgtatatgttcgttgattacttgaagttgcttaactggcagtttgatttgagatgcgagagacattagggcttggattctattattcatgattaagaatgagatgatttcagtaatgaaatagttgtatcttttagcaagctagcaaatacttttgtagaagctagcacttacaagcatactacatatagcggcacaagcaatcttcagaattataatggtatctggggggtgcctggaaaaaaaaaaaatagacttgtgagaaagtagttcacaacttttataagtttaataagatttacagataaacttgttaaaataagttttttttaacttatctcagtaattctgttaattttatgaacatatttttatttggtaggagtatattaaataagtgcttaaatgaaattctttatttaaatgcatccttagtttctttccacagaatataaaaaaaaaaaaaatgcattcttattttataattttaaaggatccttcagctggattgacgtcgatgtgtagcctgaaggctaaggcatacttaccggggtgctgacatttgatctttttggaatattttaggtgaatgactgtatacagtagaagcttgtgcacacgtttgcagtcaaacttttactaggcatgccactggttaaaatttcggcgatagcggttctgcaagcatacaaaagacagctgcaatttttttagacaagttatgctataagatgcttgtaacagatatgctatgtcgacacaaatttttgcatggaaagaaatttctgtaacaaatctcaggctcagcacctatggctgtgcgtgtttgtaattttaacattcgtattggaagattctagttatatatctgcagctgtgtccgattagcttcaagtcctagatatttaagtgtaatactttaccatgcagtttagattaatttgtataacccaaaaattgtcactcgattcagtttttgggttaaatcaagaatttgttgaatacgattgggctatttatttggcatactggctaaattgggtctctttgtaatttgggtctttttgaagttgtgaatttcgagttgatccaccagtctcatttacttatgtctcaacctcaagcctataggttatgggaaaggtagtttataaattatctttaaccttgattcttaatttttggtttactggaacaatttatacataaaaaaaggattaatagcatgttttaccacaattttcattattttacaaattttactttaaagtattttttcatgaattttatcattttaagatttaaatttttatgcattttactgatagtcatgtgtcactaaaaaaagttattttttacaaaaagatgtcgttttgttatcaatataataatcaaatgcaaaaaaaaaagaatcaagtggtaaaaataaaaaaaaaacttgggtggtaaaatgtgaaaatttaaaatttaagtgataaaatttgtaaaaaaaaattgagtgattagatttgtaaaatgataataataattgaatgataaaatatacaattaatcctaaaaaatcatataactgtaaaaaaaaacggtctcctttattttcttccttgaagtacaatcttatgctatatgattttgatcatacgtcttgatgtgcatgagaacctaacttttttgtcactattgtacaaagcatgttgtgattgcagtttggaaatgtccaaatcttggtttaagttaaaaataaatagaagtttctatcaaaatataatttaagatttttcaactgaaatctaaatgaatagtttggatacctcttaaaatcaattttaattcccagaaattatgatgaaaaatttaaaaagttgaagcaattatttgttggtttggcttttcactcgatttaaaaattgattttgaaagaattaaaggttaattcaaacacacacaaagaaattcattttcagattcgagtttcactcgtcggtatcattatatgcggcagcccaacagacaataagataagaaaaaagttgaatagacaccttaaactcttatgtaatacctaaaatgtttaatagagtaaaatatataggtatggtaagattttttatatgataagaaaagaaaaataaaaaagtattggtgagatatttatatatcattattcataatataatttctcaaatccccatgtctttttagatacctaaaaagacagaaaaatagaagaaataggctatgataagtaaatacaatatgataagagaagaaataggaaaaaaataatcatggatctcatgtttacatgattgaggggttgtgaagtgcaggaaaaaataatattactctatttttatttatatcatgttatcacccgcatcacttgattctttcataagaaagaaaaaagaaaaagaaaagaacaaagtaaaaaatagaatgaataaaaatagataagaagtataatagaaataagaatatttggtttgagaacaatagtgacaaaataaaaggaaaatattactatttattttgctcatttttaaggagaaataaaatagtgagagtctggtttttttatttctcattcaacttatttctcctttataaaaaatatatatttcttaggataaataatcatttttgtccatgtctagagtgctgacaaattcgtttataaaacatgaaaatttcaaatttttatccccgaaagtgtaaaaaattcgacaaattcatcattccgttaacttctttctattaccattaatgaaagtgcctacgtgacacagagggacaaaaatgtcacaaaaatgattatcaacgtggctgctaactagattttgaacaaaaatgttagtaagtttcaattggactaaaatgtcagtaattttctgttggacctaaatgtcattaagttaccattagaccaaaatatcaataatttttcatttgaccaaaatatcagtaattttttttggcgaaaaaaggtcagtacgtttccatttgaccaaaatgtcattaagggtaaatcttccctcttttttttttatcattacaagcataataataacaatataataatcacttaaaaataggaaagcaagcataagttaaaaaaaacataatagtcactataatatttattaataatcataatttgtttgtcacaatagaaattatctaaaataaacattataccaatgtaccaaaataaacattgtaacaacatattaatcattacaaatttatttaaattataataattactcacaatctattgatatgcttgtctttccaaaataaatattataacaatgtattaatcattacaaatttatccaaattataataattagtcacaatctaccaagactgccccgccaccaagattcgaagaagtgaaatatgggatatacttgtcttttatttataatatattgtgactaattattataatttgaataaatttgtaatgattaatacattgttataatgtttattttggtacacagatagaatatttcttttggataatttctattgtgacaaacaaattatggttattaatcaatattatgactattattatgcttcttttaacttatatttgctttcctattttttaagtgattattgtattgttattaatatgtttgtaacgataaaaaagaggaaaagatttacccttaatgacattttagtccaatggaaacgtactgacttttttcgtcaaaaaaaatactaacatcttggtccaatggaaaagtattgacattttggtccaattgaaaatgactaacattttggtccaatagtaacttactaacatttaagtccaatagaaaataactgacatttttgtccaacggtaacttactgatattttgttcaaaatctagttaacagccatcttgacaattatttttgtgatatttttgtccttttgtgccaggtaggcacttttattaacgacaacggaaagaagttaacgaaatgatgaatttgtcgcactttttacatttttgaagacaataatttaaatttttatctttcagaaacgaatttattagcgctagacacattcaggaacaaaaatcactatttaacatatttcttatctttctttttgttttgttttgaatctttccctccatttatttcgcaccaatcagaacttttagattatgcactaaacagtacataataaggaagaatcaattagtggggttgtgaagtccccttgttttcttgaagtcacattttatgcatcaatatttctacatctcatgtttacattaatctttgaggtcccttatataattctattgctcaaaactctattattaaggcgtattttcacttatttttctactagtcttttgataattccctattcaaattgaaaaaactgaagaaaaataaagtaaaaacaggttctagctaaagaaaataaggaaaagtaattgcagctaatcatctctttcacacagttccgcatatattctgcaaaaaaaaaaaaaattgtattatactatatgaatgaataattcttgctagctacttcaatttattaaaaaactactatctcctaaattccaacaagaaaaaaaagttcatatttgaattgtaccatcaagtcgtaaagtgatccctccattgttcaagtgctcctagaagagtcaaaaggacataatttcatattgagataatgaagttggaaagacatggtcagaagttacattccattctcgatcaatctatgccatgcgcgtatttaaagcctaaaattaaatatgagggagagagaaacatcgaaggtgcagccagcaatatatattagtatatcagaagcaggtctatatatatagctagggtggctaaggtatgcattgcagcagtagcatgcagcagcagcagctacgatatatcagcagcagacagaaagacagaccagcagaagaaaagcattgtcaagcatagaagcaggagagactagggactagagagcagtagtagaggctaccaccatgcatgtctctacctcactttgtccttcattcattccctcttttaaatgccctaataaagaacttgtcattcatttttatcataagcttttaattttgtaactgttcatgcatgtacggcctttacatttttagttattctgtataactaaaacttcaaaattattttcctgcttacttgcacttgcggcgtctcttgcatttacacttacgtagtgaacagtatttatatgaattaatagaagcatgcttataaccaacgactcaagtttggcaccataatggtgtacgtactcccttgcaaacgcgatgatgatgtgataaatagtaaatgatggggtattttaaaaaaatcacacgtgtgatcaactttaaatttagatgtttattaggttcttttttattaggtataaatacaaattttgagatttctgacagggaagaaaacttaaaaccttttctgtctttatacattttttttttcattcggttcttaattatatggaaaacatttagttcttatacataccaatatagaagaaaacaaaacaaaactcatctacaaccaatgtacactagatgtctcagcaaatttaatcacaggtttggacctttaaaaggatggagtctcctgaaaaaaaataccaatgtcgtttagcacccaaaaatcagattgcattctctcctcttttttatcctccttttacctgactttgaaacatcatgtaaaattgtcatactcacctcaagttatgataatattgttcaaagcttgctagtaaatcaaccttcataatttctcataaatcactttaactattaattaagcaaaactacgtttgatatactctcatttacaagttccttgagccaccatgttaatcacaccatgaaaattgtcatgagttgcttgtattttcttcattcataaccatcatatcgaaaccaactaaaatccaaacatctttgccacatactcaaatgattgataagatagctttactcgattgatatggtgattaataataggtataaagaatagtattagacagttcagtaaaggtgttttaatttgattcagcttagaatggaagagaaaaaaaggaaattaaaaacaatgtagtttgattttgagtgacagagccattaatttctttcatttgatcaggttctattaaataaacttcatttagttaattttataggtcaaaagtcattatcaaatttgctcaaatgcgatgaacacgggtaatatagtaatagactcctgggaaccatgttaaaattagttttattttaaaaacggaacttaatgaaatataaatgtgttttattattaaataactgtaaaattagtatttattcctccaagttcagtgcccaataacatacaataattaaaaattataaaatatgggtaacaagctgaacacccaacaacatttataattgactattggaagatccaagtgaacgcatgcatgctagattgccacgtttttggacttattaaactctcaacatctactaggtgcctgcctcggcctgtcttctacgtagaacaaatagatagtgaccaagggagagaaggaaagattaaatgataatagtaataactaataacaataacaatggatgtgatttttgtgagagagagagataggtacaaaaaggaatgggaagttagaatgaatgtgagcatagtactcctaatactaataataataacaataataattcctaaacctaggtctaactaaggatcctgtacaccaaaatccaataagttaatgttattgtcaatggaagagatagccacgtgtctgtcattggccaccaagctattgacctctccccctctcaccccaagggtcacacacaaccgtcctatcgcttgctcaatgtcccaaaccctcaacgaaggcgaaggcgcaggcgaataggttaacgcgtagccaaggttaatgcaagcccacaacccgtgaacccataataaccggttcaaccgaaaccgactcaaccgctccaaagtgctgactcgccgaaccgttcccacgccgttcctctccaccaccacataagcatcctgactcgcatccagcgaactcaccacgaaccctgtcgtggaccccacgtcacgcaacaacacctccgggttccgaaaactgaaacacaccaacctcgaccccgtgcacgccacaacatactcacgctccgtcacgcgcacgcgccccacggcttcaactaactccgtcagcatatgccaccccataaccgtttctggatccgtcaaagaaccaccaacgaacacgcgctcctcgctccgcgcgtcccatatctgaaaagcccggcccgctatcccagcgaacaggcccacccaccaccggcccgttcccgcgaacccgaccagcaccccgttgttgacaacgtcaccctccacggcccggcgagcgtggctgggcccaggcccaggcccgttcacgttatccacgtagatatccccgtccagcctggcgaaggcgatgttggagttgaagataacaatgcctgagacggagcgtgagaaaggcccgaagaggtggccgtgtagggacaagaaggtggtgacgtgggcccgggtttcgaggtcgaagaggcgcacggtgccgtcgacgaagccgcacgccaggtgggtatcggagagggagaggcagcgacagagcaggttctggaggaggtggtgatccgaagggtcaaacaccggtgggtcgaaaaacctgtgtatccctgtcgagaagttcctggccgtccgatgccaatacatgtactccagctgccacgtggccctcagtcgataggtgcgtcgccatatgcgtctcgtgagccgctgccacagcagatccgaccgcgacacctctcgccacgtggaacatacctgcatgcacaattttttaacaaacctagctgtaagttaaaatagctttctaatgcacgcgaccttgattgataaattaagcaattccctagaattatttatccaaaaatagaaagcagagaaattcttttgtttataaaatcctgttgcataaaaacaaaagaatatgtatatttgatttttgtgggtttttttcttctgaactataagtaggtagaatggattaaaagggtggagagagaaactattgaagatggcagaagcaggtagctactattagctaaagctagcagagaggtactcgggacctaagattattagccttcaaatgaagctaagcttacagtacctagtagtaaatggcttctcatttaatttttatttattattatgtcagtgtacttattttcagttggatactttagaatcttagataataataatgacaacactgctatatggcatgccttacgtatgaaatatgcataagctcctacacacggaattaaattaaacaatccaccatgagctatagctataatcttgcacgatcttattgggctagtgtgattgtgacagacaaattatttgtaacaatgacaagtccatataacgaagtgcaacttttacatactagaataagcacacagaaaagatattctatggatatactatttcatagaggtagtcaagtaattgtcaaatgggtcaaaagggtgagctaggtctgactagtccagctagaatatgagctatctatcaacttgccttagaagagaaaatttaatagaagaaatgcgtagaaggattagaatatactacaatttgaattgagagtggagagatctagcaatgagtgaaaagaagacacagatgagatcagatcatggcttgtataaatgtggtccattacttagcagggatacggcaaaataacgaaactagtcaatatcttagttactgttcgtgtaggcatgtgtgtgtgtgtgtgtgtgtaatgtaaacatgggtatgaaaagcgtgcttccccacaaacatttcagtttcatttccaagaaaggtgtggccaaggggcctgtcttgtttcaaacagcgaatctctagttctatccacgcacacaaggaccagtccaagcgcccctgaagggaaacttagactagcaaaatgaaggaggaattttccttaattagtgttattaaatgtgaaaaaataagttttaaatatggtttgcatatttaataataaaggtacaggtgaaatttttaacaaacaaaaaagaatttttcataggtttatatgaatactttatacattaataattataatgtttataagaggcgttggtacataattttatccaaaaagatccacctttatcgagctgttatagtttttaagtacaaaaaattaaaaaatatgcatgccccaactcccgagtcccaactatgttgtgtgtggtgtgcaattatcattatcataacgtatatagtacacatcatatgatattagtatttaatttattgggaaagaaaactaaaattataataagtgtgaacttctcagataaaaacaaaaggaatggagtgtcgccacgacatgagtagggctccatgtgctttttggcattacacaaatgctgctttttgaccgcatgtatacatgccagtttagattataggatattaaaccgacgactaatcaccggttatttcaaatgtttcaaaccctgattgagattagagaaggtgcgaagtttatgcagcaaccaaatgcaattggtatttcctatcagaaaaaatatactcctatattgttactaatagagtagaaggaactttttatttatcaattggaaaataaataccagagtaggaggacactcttaaataaataatgtaactatgaatctcttctttatttgtgtgagtgtaatgaaaatttattattattattatttttgttacgaattaatgtaacttcaaatctattttccagatttcaattgcttggaagtacatcaactgactagtctaaccaggcaagcttattctttgaacacaaacgaatgattagagaaagctaattaactttcatactacagttaaccttctatcaactatctcaatctcaataatattatatattattaagattaagaaaaagaaatggtgtccttccgaaacattatatattaattatatatgcaaccaaactgaaacaagcttgataaaaaaaaatagtacattatcaatgctccaactatatatggaaatggtacacttacaaggacgctaggaatgagacataaataactatatatgcctccctcctaatgttattatttcagaaagcaacttcttttaaaacaaagtaaaaaagctagtatccacatattttgagatagaaaggcatgcaatggatcttctagcctagatagcagggaaaagctcagtcaaaaaggattcatgcccagaaagggaaacagcaaatcgaagccaatgtaagccttttcattggttgtgaaaaggaggtccaaaactagacatttttgaagaggaagagagaacagatattggcaagaaggaaaaaaaacacccttttttgaaagggacacacatttagtttgaaaaagacccacgtaaagtagctgctttcgcggaacagtttcttctcggttggttgaaagcatcttcaactaaaacctaaatcggcactcatctccccttatacactgagttgaataatgtatgcctctctaaagtttaaacaatacacacaaaaggaaaaaaaatccgaaaaaataaaataaacggatatgatatacacatataatattattaattaagttaaatccataatgtcgatattattattaaaataaaataaaaagaatcagcatctgcaggttgcaatgctaggttcacgtctgacttgaccaatattttgtccagtttcggaactgaaaaagctatctgttacgcatgctgaagattctacaaatattcattttaagcaaactaagaatccatcatcagattaagtaaggcaaacacaaccaaccaatatgagcaatcatcaaaaacttatctttcttaacaacttctctcatagcaagcaaaaaagttaaatggggctaaagaaattaattaagggggatatatattaaggtggtcttcaacctttacattcctacttgtgagacttcgataatacttgtatttcaaagaagaagaaagaaaagtacctacctgaaataaaatggcaagggcagaagcagcagaaagacgaccattgtagttggcagcatcaagggcaagttgggtggccaaagcttcaagaaaaggctcaggcaagacttcattcatagcacgttgacgctgagaggaggaggaagaagcttcaaattgaccactacgggtggttctcctcgtactagggccagggatatcaggggcaacagcgtcatatggggttgaagaagaagttgatgatgatgaagaagaagaagaagaagaagaagaagaagaagtagaagacatgagtgtgtgagtgaagtgtggaggctataaaagtggggaaggaggaccagaccagaccggaaagggaacaaggacaaaaaggttggagataaggacacaaagtgagggacccaaaaggaggaggtgtctgggaattcttccttatactatcatactatgtccatgtcttgtgtatctctaaatctctatacctagctaccactttaaaaccaaacctctgcatacaccatacacctttctccctcaaatttgttccactcttcaataaaataatcatatcgttattaataacaatataataatagtaataatatattattaatactatactatgctttttacatttatgatatttgtggtttctggagatgtttccgcactgcgaggacggctgtgggttggtttttcaatccagctatagcaactcaactggtgccatggtcttcaggtgtttttcaaatgcaaagtggtggtggtggtcctcctcctcaaactctccctcttctctacatttatttctttttcttgatcttctactttgtcttcaagtgcattttcgattcgtcaaattagtttattgtttttaagctcacttttcgattggtggaatttattattgtttttcaaacaaaagttggcatgtgtctagattaacttatttttaaattctttatgattaaattatcatgtgaaagatcccacttgcatgaaagtggttttagccatgtatatatgtataaataataataatggaatggaactgttctactattatttgttttcttttcttttcttgttcacacttagcaacacaatcatactcctctaaaaaaacaaccatacttagtttttgttaatcatatagcctttattaaaactaagaacttgtcattttttttaatctccaatcaatttttttacaaacaataaatatttataagtaaggatgataaaatgacaactcggcccattttagtttgcttggtcattaatctgccaaaaatgggctagaatggattggtttatttttaatatacggtttgaaaaatacagcttgctcggcttaagggtggcttagctgattgactcgcaaaaatctatttttttaaataaaaactaaagaatataaaataaaatgatgtcctaagacataatactaatttctaaacacatttgcaagccaaaacagattgatgggttgatacctttttctcaacccatctaagaaagtaggttcaatggactatctaatagtcaaatctattttgtcacccatatctgtaacaaaaaataaataaaaaatgaaataaagtatttttcttataagtttaaattaatttatgtataaaaaattattttttagaagacaagtttctcttttaggttaaaattagcttacaataaaatcaactttttgaaaagttaaatgaatttttttttcattttatcttgagataaactttttatataaactatttttaacttatagaataaacttatttaatttattttttatcttttaagtatttatgcaaataaaatacaattatagaattttatcactactttaaaatatacaagtaaattcagttcaattgataaagcgcatgtttgtattacaaaattgtcggcggtgtttgaggcagaatttaaaagaaacaccttcgtatattaattaataataataataaaaccttaacttacaagcctatttagcttttgcgttcatttgtttaggaaagagaagaccaatgagctatagagagagtgttaaaaaatactgatagtagcaaacgataatcatttctctttcaaaaaattattcacttttttataaaatatatttttttcatatatggaacactgggtcggaatttagttgtaccaaggggaggtgagattcgacacttattcccccactttcggtgggaagattcaatgcgactaacttgagctgatcttcacgatcatgagctaataaatttttaaaaataaaaaaatctaattattttttttaataataagaaaattaaattaaattttaaacataaattagaggatcaaataaataattaaacctaaattaaattaattataaattcagtacttaactcttattattaaaccataaaccttaaactctaaattttatactaattgtagttagtttttttggttcggccttttcttctttttttcttgtaaaaaacaaactagttattataatataattaacatataaccctatttattaaatattgtaagaaaaactaaataatctaatcatgcataaacaatataagcaattagattaagtgcgaaaaaattaagatcataaatacctcccgtcattgctcactgttttgagtctttggattgcattgaagatctctcttgagttttctaaactcttattctaaagcactagatggtgtatatgctgatgtatataaaatgagttcagggacccaagaaggctgtagacacacttatttatagaccccttgccatcaaaggttcagttacggtgtgttaaaagaatggacgttaacgttgcagaaaaataggggatgtgggtagtggttagtttcctgaattattgttgactactatcaggttggttacaaatattttataattttaaaataaaaaccaacaaatatgtgattaggaatttaatcttaagtttgtttatcaaatacatttattgagagaagttaatttcttacattatctccaatgtaggatcttaataccaattcttacaatcttaaattattagcatcatatgtaaaattttaagtgaaatgtttaataacgatcaattctcatacaattcatatggtaatagagtgcaatatctaactatagccttgctttccacacttgaccgtctttcattacgaaaattccaattaacttttgcactgcgatcattcaagaaggaaagcacaacactagtgaacgtggcctttttccttttaattgtttccaacagagaaaatcttggatggtcagaccaataagcactaagacaaaagtgagcgtgaatttactgtccctcatttttgtgccactattatgaccagtacatatgatttacaataattattatccgttcacaatcgactatctagagtatagaatctattggggggaaaaaatttatatcttccaatgatagtttcaatttgttttattggaaattttttcgggtttcaggttttgatgttcgaagcacatgcataacagcgacaagatccataactttgcaactctaggggccaatgccctttatctttctccatttgttttgagttttcttgagtgtaagtgctcggacagattgaactggggtttcctgatttactgtaatgctcctaattttttctgtaccttatttacttatattgatcagaatgaggtttcaatagaatgtgtacatatatataaattataacctttagaaagaaaaaagtcttggacctttttacttattcaagtccgttattggacctagtctcttcacttttacatcattagaaaatcttcgtgaagtcaagattctaatcctatcacctttaccttttattctttgaagcttttgaatagaataacatctttatcctctgctatttgtccccctgaaatttctattgaaggagaaaaagaatttctagttccaacactatggttccatttgtcactgctgcaactttatattatttaatttaatttgtttaaggaaaaaattactatttcacggatcattttacctcaagagtttggagtactccctctattctttataatctttttgtatcctggcctcaaagttcttatagatactccatccaagcttgacctgcgtgcgaaaatattccattcgaaaatttcatctcaaaagaatggtggtgaacacctaatttttcaaatatcattcatcaataaacctcatatttaaaaattagaatttttaagtactatataaattcaaaagaaaacaagaataggtatatccaattgattttctaattttgtattctagttctacgtattcaattgaataaaacccataaaacacaaagttacacaacggaaaataaagatagtgaccaaggaagtatattagaaagtcatccctcaacaattttatcaccagtttgtttaaacttatttgttaaaataaatatttattttaagaaaataaatttttttaatatatttgtttaaattatttctgcttaaaaaggtaattttttgtttattttaagatttacttcttaaaaaagtatttataaaaaaagatttatttttaagttattttttaaaagtttaaacaaattttatttgcataaatcttgaagaaacccaaaccaataccacatcaacaagagaaaaaacaaaattaaaatgggaaattgaaattccattctctctactatcttgggtgaagggtcagccgtaaatatctcatcctaaatacctccaaacagcgcagctcttgcccccccttcacgttcattattttctcgtgtcacaactcataaaagtatattttgtttcttttctttttagtctttaagtttaaatacaatttatattatgagtccatattttaaaacaaaatgaatttacatgaaatcctcacttcaaaactttccaatgtttcataactatttattttattttttatactaaacatatttttatgctgaaagataattatgttcaaatcatataacattattatatgcaataaactctttttataaacatgtaacatagttgtatgtcaaaaacttagtatgacttttaagtgttttgagagttttttttattaaaaatatagtgcttttcagtagaaaaactatcaaaacgtaatgaaataaggggtgcatttagtaattttgtgttgatggttggatatttttcgtgtaacagctttatattgatgcttattagaagagagggttaaaattggaagttaaatttcataaagagccccaacggaaattgaagaagcaaaagcatggcatcacttgcttttgagatgaacgtagattggagtcaaactcaagtgaaaaaattgtttttaggggtttccaatcatgtgttcaaactgagttttgtgctctaaaagcatgtttgaggttgccccctgaagaaccaaacatgctcttagtatgtacttgaaactcattttctaacacaagttcatgctgtctctccatgttgaaggcgtacttaagtgaaagtttctttttcttgtttccttttggacatgaatctcattgctccaaacataagcaaacatgtaataaaaattaagattgttggttaaacataaacaatcttactctaattgatgtacgagtttggatataattcttttacttttaaatatattgttttcaaccattatacagaacaacactacctacacatacttatacataccatcttatatttacttaatatctgacccttacttaattttacggatttttttagtgaatatgtataatttgaaattaatttaaaatagattatatttttaactgattaaattaaaaaaataattatatattttaagcataatttaggaagtttatgcatgtttagggtttccacttttgtcttcttggttttcccattttcttttctgtctcttgttacaacaaaaaaacgtttagggaatttttgtaaaaggaatatttacctagattcatttttttaaaaagtttttaaaataagtaattattttaaaattaaattaaatgtaatttatttaaaatttaattaatatatttgtttgttattacaaatacaaattttaagaaaatgtattctaggaaagaaattcaattttggaaatacttaaaaaattacatttatttctttttaaagagatgaataaagatttaaacctttgcctccctctgacaaattttttttgttgaagttattttattttttgaaacaggttaaaagaaatataaatataattgcccttttattttactctcatatgcgacgagttttttctgtatctaaagtttattctgttgaataaagtacgatattgatagaggcaagtgcagtcatgtgtgaaaagtatttttctttttacgtacccatcaaatcgttctttcatttgaaaataatcaaaatatgtcactcgagtcttgaccactgaaatgcatctcgtgagcagctttcatagccacacaggacttccatgcgggaaacaactatccataataataatatatctatctatctatattttttaaccatgttattcacattttttttaattataaagatcaaattcaattttcatctaaaaatatagtgtgctcagttttaatccaactataaattcaaataaaacatctcttcaaatttttatcaaaattcatattttgatgtaagttgtgggctatactggatcagataaaataaaacttatattcaattcaaatttttaaaaaacgagacccaaaatagtgaagaaatttttataattgttgtgggtctcatccaaaaacatctcttcgctattgtgataagaaatatacaaaaaattgtctcgttctgtgcgttgctctttttctacgaccacatgtagacaaaacaaaaaaagaggataatttgtcactcttgtcaccacaaattattttattaatattttttgttctctttataaaaccaaataataataataataataagagtatttatttttatctatttctcttatttattcttctgatttattctttttcattttttcccccaacccaacacaccattaaagatcaatctattacattaatcgagatcaagttagatatgacttaggtgaaatgtaaatgtgactacatggagtcaaaccaaaaagtctaccctgattcaacgtttgcaaaataatgtcaaagttttgtgaaataccaatttgcataagttttttttaggttaagcccaaatggttccatgatcatattaggctaaaaaaattaaatttattttgtgctcaagattaaagttcaaggctacaattcattgagtgtgcttcgagttaagtcgtttacatacttgatctggatcataatttataacaagttgagttaaaaagtcaaaatttaaattagatttctaaaatgagatcaaaacacactagaaacttatgttattcagactattgtgacctaaacctaataaaaaaaaagttaaatttaattcataatcaaaatctagagttgaatcttatatttttcaacatgtggattaaggccgagtcaattgtttgagtctattttgtcacctttatgttaaattgaatacttgcaggagatgaagaggtgtgaacgaaagtatcgaagaagatgcgataatattaaaaggttaaaataagattttttaaaaattcattttcactctttttttacccaaatagattttattttcaaatttaaatttgaaaactgaaacacgagcacctacaacagccacaagtaggatattaattgtttatcaaaatgttcttttttttttctaatagaataattataccttttattgaaaatgagattttaaatgaatcttaatctcatcatattttatataaggttccatacatcatatttgattatttttactatgatattaatgtagaatatctacaagttttagtaatgattaatttctattgaagaagtgattgattactatcagtaattttttttaatcatgtttgttattcataaaatttaaattcaagattttatttaagaaaaaaatgaatttaatatgactccaaaacccctctgactagcgaattattgatttacatcatatttgatataagtgatctgaatccaattttattaaggtgaatgtgatattggtataaaaatttattgctacatattaaatacaatatcccagattcccagttgttgtatagtagtgaaaaatcttaagacggttgattggtggtgtagtgttgtgacttgtgagtggtggggagtgtctaaaaagatgcaatgcaaggtgagaactgagaggagaggcaatacggaagaaagaaagaatggtgatgagatcagagggatgaagaaaaaagagcagaagacacggcaagattagattagattctggtgaggtcttaaattcttaatcacatgcggaaacagaacaagaacatcgaagatggagccagccaagccaagcagaaggcacagcacagcacagcagggctggctgggaagctatggcagaatgtgacagtcaaaagcaggaggagagactaggcaccagagagcagtagtagcactgtcagcttctgtctctctcattcatactactactatttttttttttttttcataaacaaataatgaaaaattcttaaaacacttttactaaccagcagtgtcttcaaaatatagttaaagaattaaaatcacagagtatttgttatagaaattacaagagaacacaaaattttatcaataatataattttatgtattttaatcaaaataaaataattctttaacttaatactgattaatatttatcttactgttaatcataaaatgtacgaatcaattagtttaaaattgtctaattagcaatttaaagtaacgtggtgaaagtatgaggcttattaaagttttctctttctttttctttattcttccctactaaaatgacaactaaattattatttgtaaatacgaaataataagatttactttttcctttgtgtattaatataaaattgtcaaatgctttcatatgttcagagtcattttcatattttctacccacaatgataagtttttgtcatatagtgatagtagcatagctaaaacaagaatattggcgtactatgactttctccatgttacgtaaacagcactcttattttgtcatcaatgtatttgtcaatttagtggaagtatatatattttggttggatccgtgtagcacagctaagattttaatacttatgatatcggagtacgtactacaacttctacatggtatatatgttaagaacacactgtttattttgtcacgatgtattcgtcaatttgggactgtttgttataaaattaagtaagattaattttgataaaattaattctaagctactaaaatatattaatttatttaaattataatttcacattaaattttggacttatggtgtttttgaaaacacattaaaaattgcaaaacgttaatccctaacataattaatagttacttttgcatcacttttaatgtgattttgctccgaacatggatctggaaagtggaaccaaacacgtatttagtttttaaaaaaggtatcccattgtaaaattgtaaaagaataaaaaaagaaaaacataatattgttttagttattgctgattagttttttagtttcaactaacaaaacaaataaagatagtactgtttgggttctaaaaagttactatataaactttgtatttaacaataaagtaataattcggagccaaatttatcgtactcctcgttcgaatgacaagagagaaaaaatgacagttacataaattgtttatactattcaattcaatttatgttacagagtgaggtacaccaagtacaatttttacatacacaatgaacattcaaaatcagaacagacaacagaccaacacagatatcttattgcagtccatacacagagagaaggcgaagtcaaatgggtcaaaggtttagagcggtcactgaacctaaaaaagtacgtattcatgattttaattaaacgtacctataattttttaacattatataacatttttaatcataaattaaaaattatacttatactgactattgttgagatgatgattgagtagcatgagatgaattactaggatacatgaattattgtaaatcctagacattatcaattcttacgggtcaaaaattttaaaattatgtaagacacctttgttaaaactttaaaataaatacataaaatacataaaatttgttttgtaaaataaaaaaaaaactatttttaaagtaaaaataatttagacaaatacaataaaaacagaaaataacttattatattaaaataagcatttattttaataataagtttaaacaacctcaccgtataaaaaaaacttacaatattgcatgtttagatacacaattaataaataaaaaattattatatgatatatagaataaataaaggaaataactattaaatttattaatccttcaaaggtttcacaatagacaataagtaaattttataatattagacatatatatatatatattaaaaaatatatttttaattataagtctcagatgagataataaattaaacattcaagcatttaacatatatacacacaaaaaaccttcgttagcgatccaaaaatcaatcgctatataggtagcgaatcggtcgctaattttcttggcattcagagaccgaacattgcagtattctaaaacccaagtcgctatagaaactgatttctgatttactaatacttagtatttcggtcgctaacaaaaatggtccgtcacagagtcttcagttgcttctacattttaatacttgcaattttcatatcagtaaataaatataatttattaatatctaagtgtttattatcttttaataaatattcaatgttaatgatataaaaaactaagtttaataataagttgtgtttctcaagaataaatttattattgaattgtaaaatttaatgattaatttatcattaagttatactaaaaatgtaagtgtcacaccttttacacatttaaagattatattaaattttttattcttttaatgattaaattatcatcaatatatatatccagagaccaaaattattatttacattttttttctttttaagatcaatatattgttcatttcttaaccattctgcattttattaatttctaatcatttttatagctttaatttttttaaattaccttgtgtcgagttataaatttataataatatcttttattttaaagttttaacttgaatgaagttaactattttatataaaggatttaataaaaatatctatatataaatatttaccactattttttcctcatatcttcgctattcctcccctcccttctctcatgaagtgataaactccactttcgtaacatgcatataatatattctcttatgtttttaaaacaactgaatggtttaataagttataaatgaatatcataaatcaattttaaatataatttttttgtcttcaaaattaaatatatttctaacatatgatatatcatgttattctttaatattaaatgaatgtttaacttaattttttacctctttcaatctatcatttttgatatatttagttctaacatgaatttgaatattttttaaattatcaacaattaaaatagcaatatatcataatataaatttctcatcctaaatctaaaatatgatatatatgttataaaaaattatttactactgattttaattataatatcatttatatatttaaaaatatttatttatttaaattttatttatataaaataaatatttattctatgcaatgtacataaatattaatttcaattaaaattagataacggatattcacaatgctccatcattttttttatttgtaagaaaataactagaacggattttatttataactattactttgtttcttgttattgccctcccttacaatcccataaaaatccaatattatccctccctaaaaagcattgtgtttctgttgcacaaaaggggtgcgaattttttgcacaataaaatcattattctattgcataaaggcataacggtttcgtgattccaatgtgcaaaaaattcacatacccttttgtgcagtggaaacatgataatgtaatgcttttcagagagaaaaaaaatatacaataaaatcgtgatttcattgtacaaggagtggttaaaatatgacagttctacgaaagcgtgatttcattgtccaatgaaatcataatttatttttgatttttttcctgaaaaagagaaatgtacattcagagaaaaaaatgtacaatgcgaaatttcgcataataaaatcaagattttgttgtgcatcaacaataccaaaaataacaaaattgtgattctgctatacgaaatttcacaacagaatcatgatttcgtttgaccatgaaaatgaaaacaaaatacttggcaacatgaatgtaaggtggtgtagaaaaagggtagtttgataattgtgcttgtctgaaaggggccaagaacaattttgttgggtcaatagtaacacccaatggcgaatgattgttggaaggggatattggatcaccgaattgggccgtacagaaatgctgttcccttgatagaaatttttttaatatctttgtaacgcttccttaaattccttctcacaatataatttaaattctacttttaacatggcaattcatattatgtttacttataaatagtattatagtaatatttcaatcattttagatcataaaaccttgatggaggctaccttgctctgaggtaagttccatccttgattatgaggacgtcccaaataacagcggaatatagtcttttagtcgctctagtcattatttgcatttttgtttctgccaaccattttagctgaaattttccaaccaaacttggtcacccttgcaagttgcaatatagtactataaaagagcatgcgagtatagtattgttagtacgaaataaagaaacttttattgaattgattaacgaactttacagcgtgattgctcatagcgggccttctcttccgctattatttacaagccactgcccaaaaatatatatcatgaaacacaaaagcctatcttagacgtggaagcaaagctcgataaactctcctgcggtggtaatgagcttcgcagtcaccattaggatttggggtacaagaaattttttggggtggtggtgtggtgtttagatgactgttccactaggaattaaagcatccttgattactgtgacaatcccactttttatgaaatacccatctgtttcccttgcagcttcttggacattgtcactgttaataatctgagaattggaaacaaaccatagattagatttaaaatatcccgtaacatgtcacatgaatgaaaacaaagtatggcaacacagtatgaaaaaaaaattgatatatttagtgagaaagccatttttatcccaatgaagaggaaatccaagtcatacaattgtatatgagtgatcattctcatgatcgagattaaaagttttttgaagatagattattacttaaaatattacatgattttattttattttttaaataaaacgcatgacttatatattttaatcttgatcattcatgataaaatctaagggtcaatatttattattttctcaattgatatgtccacacaaacatataggagacatatcaaatgaaaactattttttactgagaaatcagatctataaatttcaaccatacaactaaatataaatggtcaaaattaaaagttagtgtcacatgatcacttaaaaaaagtcttaattattgtatcattgtgagaaatgagaatatttaaccacaatcatcagataaatttaatgatttagattgcatatttaattacaaatcttacatgatctttaattaaatagaaagaaaatcacacaaattttataattaaatatgcaatcattacttaaattatcaattattgacataaccaacaacttgtcaatgaatgttaacatataaaagagatagtttcttaagtggttttgatactgaattaaaatttgacttcaataaccatcaaccttaactgtgtaggttattgaggtgaaactccaattttgattcacaaaacaataccaaaatcacctaagctactacgcctcacctgttgtcttgggaaaaattggcttagaatgtaaaacaaggaacaaaattgtatataatagaagatgttataaccttgacattttccccaattcgagcattcttgtcgataattgcccttttgatatgagagttcctgcctataccaattggaacactgcctttagcagccagaaacctcttatcagcctccgtctggaacacaacaatcagaaaaccaatgttgcagttagaacttctagtcaaactaaagccaatcgtattaatcttattcacatgcaattgcaaactcacaatcgataaattgaatatctaagtgtttcaaccactttgacatgtgaaactttgttggctattaaaacttggaaaaaactaggtgtaactgagcacaagttatttagccacattattacctcgtaataatctgcccccattaataacgtgtcttcaataattgcaccttctgatatgcaagatcgcagcccaaccacagaatggtgaattttgcagttctatggaacaaagtatggaatacaaggttagtttcctataaataaattattctcattatatttgacatctttgttaagaattgtataaatctcatgtatagagcagatcagtagaatgtgaaggttctgaaatgcttaccttaatcacacatccttcaccaataacactatcagtgacatcagcatcaagcatcttagagggaggcaaatatcgtggttgggtgtagattggagatgaacggtcatagaaactgtaaccaatataccaaaacgcatgaacacataaacatcagaaccacaaaacactatcattgaaatacatgtgtcaatatgatagatatatcaaatagcctatataatttacctgaagtcaggcacaggctttttggtgattcccagatttgcattatagaaagcctcgattgtaccaatgtcttcccagtagccatcatacaagtaagcttgcacctgtgaatgtacacaaacatgccgtacaatattctcaaaaaattgcatgctaaatttaccatgcaagaaaataacaggaaagtttttgtaatattaaataaccggaaggaacacatactctcattccaatagaagtagcaccaggaatcacttcactcccaaagtcatttgcaccaggaaacttctcacggagcaggtctaacatcacatttttgctaacaacatatatacccatgctagcaatataaggcatttcctttgctctctcgtcatcaagacccaaaattgtagtatcaacctagtaaagaaaaatgactggcatttttaagcaattgttcaggtaataatttccagataaataacaacatataatacatcttatacgggcttaccttcatggctttcaactgttctccttttggcttttcagcaaattcaattatacgcccctcttcatcaatcttcatcagaccaaatgcagtggcacgagcttcatccattggcaatgcagccacagtgatatcagcatcagtttccctatgcgcttggataaatttctcgtaatccattcgatacaaatggtcaccagccagaaccaagaattccaaaacattgtgctcttcaaaaagccacaaatactgcctcacggcatctgcagtaccctgcaatgatcacaccaagtttgttaaaacatcaaatcaagggacaacaaaagtcatcatcgcaaggtaccaaaatttagagtcaaggcagtgctgtcattacctggaaccaattaggattctcaggactctgctgagcagcaagaacctcaacaaatccctcatttttgtagccacccatgttgcttgcataagcacgagaaaggtgtcggtttaacgacgcagaattgaattgagtgagaacatagatcttgttgacattgctattcaagcagttgctaacaggaatatcaattagcctatagttagctccaagaggaacagctggctttgccctcttcttggtgagtggataaagccgagtcccagcaccacctccaagtataatgccaagcacactctataaaaattttaaattgcaatcagaatcagaaccagaaccaatccacatccaattcaaatatcacacgatcgaaattcaaactattgtgatctaaaaaaaaccctgtttacaatttgatccacaaatacaccctaataaacatatgattggggatttgaaatttctcagtaatttaatgttgtaacaatggaacaaatacagagacaaaaaaatgaagaaaggaggtaaacgtactctgctggcatcgggatcaaggcacgtttgtgagttttgggaatcagaaactgctttaggagtaacaatcactggattgcgacctctttttggtgccaatgaaactgaatctgtgggaatcttgtctccacaaagttgtgatgcagagaatgaaaggcggcgtggaacgctttttcttcccacatacgatgaaggggaagaagcagaacgtggaacattcagagaacctatagccgccatagatgccattactctgtgtgtgtgtgtgtgtgttgtgacttgttacttgtgagtgtctcagttgaaagaaacaaataagtgagtgtgtggttcagaattggtgtgtgacactgttaatatgcaaatggtgttagctattattatgagccgtatagtgtagatactattacataccttggttgatgattttttttaatttatttataaaaaaatctgtcgttgggggggaaaaaagtaaaaaacgacaaagcacattttcgtaggatagagatggaaaattggaaatgcaatgcaagtggaaggaacgaattataggtggtaagaccgaggggaagggatttcacagtttgaaccgttcttttattcgaaggagatgaaagggacaggctggcagggtgggtaatttcatgcttcaatgagcaccgttcagaatcttgcttgcctcacctctcatccccatgcatttgtcttggtctattctaaatctagttctaggagtaatattctaggtatatatcattctcaatttttaagattttcttctttcttggcttaatccatttcttttccaaccaacttaacttaattagggtacttgattattttattggatctcgagattctcatgagcttcgaactggttattataatattaatttttagttttaaacttccttatatttaaagttttttcctcttcctcaaaattgtatttttcaaaaattaaatctagatcttctttaacaaattcaatttgtgtttgtcaattcagctacattcattggttgggttaaaccaatttaatactactagaatatgccaataaataaatatacgtgggtagctacagtttactaagtaaaaccaattaaaatggggttgcttgcacttgaaaaggctcggtaattatatactgttttattttatttttcctcgttataagacaatgataaaaatgctggaccgactttgctacaaataaaagatacttcaaaatctcttttcataatcttttaattaaaatgaatttcgtattgctagaaattaatagaagaaaatgacataaaacaaacgcctcaaagttcagggcatctatttaactgatgctggatgagtggatgagtttgttgtattataattatccttagttttcttgtactttttcttaaaaaagtttcgtatgtagagtgaaacatgcagtgactaggttgcgttctcattttccacgggagcaattgtatgccacataggtatgacggcttcaatgaaaggaatggacctctctcacatacacgagctcaagcacggacttgaggggactagtgaaatttctcatttattttttctttttggtatttcgggtgttatgggtttggaactttggattggcaattcaatttgctttgctttctttaaaggccaccaatcatagtagggtggtaattattaaaaatgggtgccaaatttctttataaggtatcttgctcgtgaatgccatctgtgcattgattaaatcctttctttcaatacaattccatgttcaattcacctctgtagcgcctctagatggacgatttcatgaagttttcaagttaagggttggtcatcaattgtatgatacgaaaatcgttattatcgaacttttggaagcagaatggaggcatagctaacaaggggtgaaaacaatgacttctagtgaatctgtgatgctaagcttgagtctaactttatatcaattttctgacctaaaggagtagtttcacaaaagatatcattattagttttcttaaaaaattagaagaatgcgggacatattttcttactaaactgtgtaaattaagtttggtgaaagtttttatgtcaaaaaagtttcgtgaaagtattctcttgaatcagtgttcaatttgtaatgcttaagtacctaactcaaatagtccaatattactattgcatttcaaagggaaaagggttacgtatgggaaaagatgggcaataacaaggcccatgtatatttcattttattttataaaaaagatttttttttttttaactcaggaatatccttagtctaaaagtaaaagattaatccattaaaatattaagatagaacttcattaaataaacagtgagatttactaaaaattataatttctaatatttttcagttaaaaatagagaaaatgttagagataaaaactattaaagagagtgttgttaacatttttttatacaattgttattattagttaatttagtgtagcagtaactaagatgtatttttctttatgcattagtgaggtccctaattgattttttttacttatattaattttaaaaaggctccacctcagatttccttttaggcttggattaacttatcaaaataggagttgaggcaaccactttagttaatgaccaatatctaatatccaatagttgagaacttatacttgatacttaataactgacgattgatgacgggttatcgttgatttttgacggttagccgttgacgattgatagcttacggttaatagcaaacttagaattgttagaacaaagttaggatccattaaaattaggttagtgattcaatcaagtgttcaagaggcgcaaattgtttgaacgcacgtggaaagcaacaacatgacatggtcaaatcattcaaatgcacttcccaaaaaaatagaagtaggcattgaaagataactactactttttttcacatggatgggtaataagaagaaaacattagcgaaaaatgtttaaaaaaatgaaatgttttaaaaaaacattgggtaataataagaagataactaatattttatttatttttattcttttgtaagtttatatatttttatattttgatatatgtaagtatttcaagaattataaaaaaataaattaaaatattatacatatcgaaattttaaaaaaatacgaagttatcgaaattagaaataaacaaatattttactatgtatgagatgcttaattcttagcagaatataagtacatatatgaaaatttaaaaagtccgtatttataaatatcttaatttctaaaaataacaaataagtgcaaacaaagtccgtatttataagcaccaaatcacatgtgaaaagacaggttcttaattgttagattggagcatccattgtttgattagtttagcattattaactcactgaccccactctgtggtccacctcagctgccaccatcttttttcttattcttatgtttcctcttttctctttcgcacaaacgcgtacgtagcaataagcaatgaccagaaaggtgtcgaatttctccgatctaatccaaagggtcaccacctcctgcttcctccacccattcaccaatgacaggtctgacgccgacgacagggaagaggagtaccacagcggctcattaggaaacagacacgaagacgaagatgccagcgaagaaggttacttcggtaaagaaaaaatggtgatggatttgaaggtttcaagagaggaaaagaagttggagaagatgagggcgttaatggaggaggtgttcgaagcggtatcggcaatgaagagtgcgtacgtgagcttgcaggaagcacactgcccgtgggacccgcagagcttgagggaggctgacgtggcagtggtggcacagctgaagaagcttggtctgttgagggacaggttccatgggagtgtgagaagtgttgaagaaggcaagagtagaaggagaggaggagggcatgcaccctacgagacactcatgaaagagctgaagaaggaagtgaaggccaaggatttgcaacttcagaaacttaaagacaaagctcggaggcctcagccttacactaagacaaagcttgcttgcaatactcatattcaaggtaaaacaaattaatacgtcatagttcacttttcaaattaaaaactcagttacttccgatccacttacaaattgacatagctaggcggaaaatgattagatgggtcaattcatacaagacacatatatatagtcgagttttttttatatgtttataataaaaaatttaatacaagtcagttgtgtatcaaatgaagattgacacacacacacatatatatatatatatatactaatatacagagagagagagagagagaggaagggagaatcgtgtaatatttttttatggtgtactttcaataattaatgaagagcaatatactcattttaattagtagagtttcttaagtgatttatattattcttataatttatacaataacacttatttatttatttattatattttatatttttctcttttttttttcttaattgtaaaatttgttatacaatttattgtaaaaaaacatttttcttatgtgtatatatatattagaaaaaaaatgtgtttggttagccagaaaattcaattggtatatatgttaactttcttgttcaacgtctagaaaaaaaagaagaagagcatcttaattataccaattgcaaccttttgacattggtgtcatgaaatagcggcagggtttgtagcagcaccatccccagaactcttggaagcaacaatggcgcaagtaaaggaagcatcaaagtccttcacatctctactcttgtcgctcatgcacgacgcacaatgggacatggctgccgcagttcgttccatggaagcagcttctgccaccaccaccgacaaatactataataataataataatatttgttcagtaaccgccacctccaccacggtctcaactcttcatgccaagtacgcccttgaatcatacatctacaagaaaatgttccaaggattcgatcacgaaagtttctacatggataatagcaccctctcctccctcctcaaccctgctcagtttcgccacgattgcttcagccaatactgccacatgaagtccatggacccttatgagctccttggaggagttttaccaacgtgtaattttgggaaattctgctccaacaagtacctttccattgtgcaccccaagatggaggagtcactgtttggtgatttggagcagcacagtctagtctcagaagggaaccatccaaggactcagttttacaaagagtttttgggggtggcaaagggagtgtggttgcttcatctggttgcgttctcgtttgatcctgcgccaagtaagtttgaggcaagtggtggagctgagttccacccgcgttacatggagagtgtgctgaaatttgctggtgggagggtgcctcctggaaacattgttggtttctcagttagtcctggttttaagcttggaaatggctctgttgtaaaggctagagtttatttgatggctagaaactgaggttatatagagactttaagtgctgtgtttgaaagtcttcaaattaatgtttgcttaattagcaggacttacatgcaaagttgtgatatatactatatcgttttttaattaattcatgtttcttagaaataaatagtttatcaattatttgtagtattattttaaaattatttttcttatttttatctatttaattatttttttattaatgtttgaaaaaaaaataaggaagcaaagatatataaaaaaaataattactacatttaaaaactagaaaaaaatcttataattttttttataaaaaaagtcttagatttcataaccaacgaaggaagtataaccttattgaagtgattattacgatgaggttcattctcgaatatgttatctgacactggagctaatacctttccccgaatataaaagttaaataaattattagttcattatatattagttagccggacattttagtttttgatatgttaaaatctttttgttagttagttttacaatttgtcaaatatatatcattcatttcagtactcattaaatttatgcaaaatgattgtaaaattaattgaaataaatgttttttttcctcacaaaattaagaaccggtgaagaattataaaaatcacattgtagcttgatatatatatatatatatatatttgttgttagctcaaaatgacagtcaaaataatgatgaaaaataatttaaataaatgatttttttactaaatttataaataaacaatgaagaatttttaaaatctcattaattaaaatatttggcctatacaattttagtttaaggatttcctctctcacatgggccaacatatcccatcgcaatcaaacaacggccacccagtgtttcagctataacaaacaatcattacgagttttgttgacaatgtgccccacaacaaacgttggatgaatagaaagctactactaaatattgggcattttaagattcacgacaaacagaatcttttagtcaaactgtgaaattgaaaagttaattaatagatgttttaaaattactattcttttcgcaattcaatgttatcacagaagatcaaactcacaaaacagttaatgatacccttgtttttgttgttgttgttgtgattttctaggaaaaaagtgacatgaattatcaaaagtaaccaaagatgtaattttatgggaaatttcattattgttttcatcgattgttcatctaaagatgggatgggaccattctgcttctataatggatatataattttgaaacagtagatccacttgattcggtcgagaccaagatgaaaagcgaagttactgaagaggtttgctgcaatggtcatataaacgtgttaccgaatggtaattaatatatttagttacttgtcctaaacaaatgaaactatataggattcttattaagctatagtagtggatgtgttttgtgttttgtgtatatgtaatttttgtttttgttttaattatctattttccttagtattttaagtatgttatttgtgaggttttcccattagattgtgattctagattgatagttgatccagaagatgaaaataaaaatgaaataaaggtgtaacgtgcttaggtgggtaataagatgttaagtatttgtatcatttattattgtggtcgtattatcatttatgcaaaaagcttgatagatttgttgaaaataactcatttaaagtgagattgtgataaatatatgctcctgcataataattaaattatgaaattcttaactccattgatttttaattaatggttatcatttaatgtgaacttctcacgttagaggagatgaatcttatttgatattgtacaaatgaagaaagagtgcaaagattgattaaggatggaaggcttttgcaaattagcataatttgaaggttgtccacaaaattatatttgagttcccatatccaaatctaactttgctagctctattgtggattgattaattgtaatttaagtgcttcatactctatcaatctctctaaactttgtttaaaacttttttttagtgaaattttgcaaaaatgatagtactttgattttgtgaacttatgaactaaatatacatcattattttataaaatatattacatattccaatcttattacttttgtttctcatttactaagttttacacaatcataactaaatatataccattatattatatatttaattttgtaacttacccatgcggactgtactaatattaagctataagagtgttttttgcatgatgagacataagtgatggttctaaaatgaatgtcttgatttgtagcatttattattaagggattgtgatcatgatctcgtactttacagttacatgagtcttaacatgtgaaaggaagggttctgaagccatcaaaagcattaatatatggattgtgataagataattgagtttagagtaacgatacctaaatatttcattattttaaatattttttgcagactttttatttttctctttttattatatcataaatcctgttatatatatatatatatatatatatacacacatttttttctcctctctcggtgttaaataacataatgagtgtttatgtaatgttttccttgggtttaatagcattgaataaatgtgtttgctttatttgtttatgggcatctcttcccgcatcccaaaaaaatcacctagccaacacctcctttcattttggaaagggtgttttaacctttgtttatttgagcctaagtggtcataatgaggcccagaagaattttccccaagctaatgtgatggttcaattgacgtttattgttattgagctttaatagggtgggtaaagcccttggcataatctttcaagtttcaataatttctttactgctttgaaagtttcattctttgcaaatgtttagtttatattttttcccgtgcttattgttttcttcaaagctttttaaaaattacttttataattatcttaagaatcattcgaaatttacgagtaaactctcaatttagttcttgaataagataaacatggtcactgtagtccttaaatttactgaaacaagagataatcctctgtaacccatcattcaagtaggtcccctttttaagtctcgtttgttcacataccatcctatgtgacacgtctagtaggaatgtttaaatctaatcaaataagaaaaataaaaaaatcgatccaaaagaaacaaaagccaatgaaacagactatttcattttttttactatttatatttataatagattgatttgaataagtttttggttagtgtttttaaaatcgaatcaatccacacttaattgatatttttaggactcgtgtattttatagcacactaatttaacattttttttgttatcaaataacaaatgacgaccaatgacaaatattgaagggaagggggtagggagtgcgaacgggagagaagagaaacgggtgagagggaatggagggtgtgaagggacataactacacaagtaatataggaaattcaataaaaaaaaaagtgagagtgaagataaaaaaatatcgcattgatacatttaaatcagtttgttactattgtttttaattaaaaatttccattgttatcattgaaaaatatcatgtaatccccaaaaatgaaaagtcctgctagtatttcatagcatcaatttggctgcacaacttaacagggacagagattgaattcacattaactaaacaaaatattcattgattaaaaattagaaaaataatattacaaattccaagacttaagatatacacttgtatgtttccaatcatccttgtcaaatggattgtctattcaataaatattgttaacttgatattatatataagatatcatgttgatgatttattgtccaacttaattacattttttgtttcttatgatattgtagtcgtgaggcattaaaattaaaagtgcaagttatcatgcatgatccaatgcaatgttaacaaaattgtaaaatatttaaataaatgtagtttgttttacaaaactaaatataattagaaggactaaaactgcacaattaagataattgaaagccatatttgtgcaattggaacacaagattaaaatcacatttaggaaatcaaagatacaattaagtaaaaaaaaattgatggtaatgacgggaattgaagtgacagaaaaatcccgcggagtggcctcagaatgttgcactacattaaagtataaataaactcgtcctattgttgcttgaaaatagaaattaacaagaaaggaagaaagaagatggtggaagctcgcatgcaaggttcagtcctaaagaacatggttgaggccataagagagatgaaggtgaacgatacaaacttcaatttctcccagatcggcttctccatgcaagccatagatcccacccgcatggaagtggtggatatcttcctccaatccgatgcattcaagaactactgctgcgaccgcaccatctccatcggcgtcaacctcaacaacatggccaagatcctgcgttccgccgccgacgatgacaccatcaccatcaaagccgactatggcatccacttcgccaacttcatcatcgaaagccctagtacgtttgttttccttctctctcttgttagtttaagatttatgcatttccctttacttgatgaatgaaaagatagaacgtaagctagggctgttctaaagattcgtgtgttgttgttgtgtgttatagcgcgagccaagatatctcattttatgatgaatctggtggatatagacaccaagcccgaatgcgtttttcccgaggagctgatttacgatgcctatgttaagatgccttcagctgagttttcaagaatttgcactgacctctctatttttggggacaccggtaattcgttcctatatatatttttctcttttgcatgcatgcataatgcattactttacgttcatcattttattttgcatgcatgtttctaattcttgctgcttcttcattctttaattaattgactttgcaattaattaattttttcatatgtgttgctgtattttagtttccattatggttaacgaagagagtgtggggtttagcagcaaaggagatattgggacttcaattatagtccgcaggaacaatacttccatccacaaggtaacatgttcactagcaccaaattctttcatgagcgttaacgtaacaataagtaatttgggcttatattactctctgtgagattagaatgtgtgtatttgtttatgcaattaatgcatacaggctgatgaggaagctactgtgatagagattattcagactgtgagcttgaattttggattgacatttttgaactgtttcaccaaggcaacgccgttgtctaatacagtcactatctttatgtcgaaccagctgcatctgcctgttgtggttcattacccgattggtgagaagggttatcttcgcttttgcttgaaccaaattaaaccttaatattaggtgctcttatggattttaaattcggttgtaggaagatattttgtgggttaacgaatatggtactcttttacgttttgtgtagttgcattcctttccctgaccacgttattttgcacattattggatgtatattttgtaaaaatacacaacatgactgtgtttgctggtgttgatgtagcatattgtgtagttaacaggaatcgagctttgatgttgggactgctttactttgtgctttcatgtcctttgtggtaggaaaaagagtatatatgtaaagcacttttcagttttagtttataagtgcttttccacttaccgccaaacagagtaatcataatcataaataatatctaactaatggtacgtttgtttcgtaagaatttggacggatggatggaaagggcaccagattgtcaacttcaagttttagtgttttacaattgttgtcacttttgaattgtgcaaaatagtggaagataaaagaaatctaagtgaaacccacctttaaaaacaaatttctatacttgagcagagaagtggaaaagtaacgttttgtttatacatttatcaaattgcccttattttataatatttttttaagaatatttatatcattttatgttcatgggattttaaggatttttttcatagatattcaaaatcatagtcaaaatttacacgcagaagaatatgtgcaattcacctactgtttcattcattctccttatgtgatgatttataacagtgttaaagaaatcaattactttatagatatgatattatgattgcagtgtgcaggaggggaaaggttagaaactgttaaaaggagaaggttataggaagtatttgagagaaatgaaggagacaatatatgaaagaaaattaatttttattatatgagaaatgtttttgttttgaattagtttacaaatgataatttccttgctttttatatgcttcaagagaaaaatctaaaaatatcaagaaaaaaattcacacacttcaagaaagaattctattcattttttcaaattatttatttatacacacttttttcaattatttattaaatattatttttatttatctctacatttttttaaaattttctttagaatagtaacacaaatttaaataaacctaacacttgattttaatggactaaattaaatttatattattcaacagaaatttgtaccaagcccaactccccaaacgaaattagaaataacacaaaatcacaaagcaatggaaataggggtgtgtgaaataaaaactcacaagccactgggaagcaatggaagtcgagagccaaatctcacatcagagataaagcgaaaaatagataagaaggcacatgcaatagatctgtatttctagtttcttaggacatgtttgtattttattaactttccgttcgcacaaattacaaagtgtgattttaatttgtgagaaataacaatttattatttttgtctgaacgaccgctcaaacattaaaacaaacatatatttaatatttgatattttattttaaataataattgtagtcttattcttttttcctcctaaagcagtgtccaacccgtgtccgaatcacaatttttttttttttaatttgatactgtaattgagtattcgaattactttatcacaacatttgtaaatcaaaattgatcatttaaaaaatatagatactaaattgtcaataaatatataattattttttatgactgttgatattaatgtaaaatatccattaattttatttaagaaaatcgaatccaaaattatttagatcaacaacttattaataattctgaactaaatataaagtatatctaaaacaaataacaaacccacagtgtagtttgttaattattgcaaaggttataaaaactgaccgtgtagtgaagaaataactttaaaaagtataactagtagctcaagggtgatgatattttaataaccttttatttttaacacttgaccaataattttttattttattttatttctttcatcctattacatcgcattatttatcgtatcaatctttctcttgtaagaaaaacttttttcaaaatgaaacttaatgtttgaaacctatatggacttccataaagttcacggttccaaagtgttcgtacaaaaattttaagaatgaagaaaaatgctacacaatagaaggggaggagcgccgaggttgctgatagtgatagctattcaatcccttggtttgcaattacattggtgtgcggttttgattctgaaaacggtgattttaccaatctggctttgccatgcatgttagatgggttgggtaatgggtgtcattactcttcaacaaccacaagataggttgtagataacacgcaactagaacaaaatcattactctctatgatctcacatgaacatatagaaactagaacaaaatcatctatgaacataaatgtcctgatctagttacatccataaagatcgagatgaaagagagaagtgcaatcaacaacattcgtaacataaacatgttttaagtttctgtaaatataattatgtataattctaaatttttttgttactttggtgttccttacattttcttagtaatctattttagtccttaccatttactaaatttaacttaatgctaaaaatgaaaaagtgttggcacatctagtttggtaattaatatttaggatacaaaagctgttcatcggtgaagaaaggacttaaaaaaggtataattattagatgaagttgataatgggatgtaaggtttgcacgtttaccaacttccataaatttcagggtactatctcatggccttctgcactgtgttatgctaagagaacgaaagtagcgagttaatccttattattggagttttttttttttttacaaaatgtatagataatattgggagaaaaaaaattaaaaacattaatgcgaggaaccaaatagcctccctttctctattgctcataacatatcaatttaaattagaaaggcacaagaaagtaataagtatagaataaaagaaaaaaaacaaatgttaacctgcgtctttttgttaagaaattagaaggagaaatctttttttttttttttttttactttaattacttatgatgtttgtctttatcggacaattaagtccaatttaaaaagtaaagaaagcattgtgattctcgcttgctgtgatgaaaaccaaatacaaaaaagtgttgccacgatctagtttggtaattatttcaaaggatacttagtagatcaagttgataatgggacgtaacgtttgcaagtttatcgacttccataaatttcagggtattaatctcttggccttctgcactctgttatgctaaaagagaacaaaaataccgagttaatccttattgaaaaaatattacaaaatgtctagataatattgggagagaaaaaaaatgaaaacattaatgcgaggaaaccaaatagcctccctttctccattgctcatcacatatcaatttaaattataaaggcacacgaaagtaataagtatagaataaataaataaaaaaggtaaaattgataaaatctatctaatgatatgtcaggtctgtaaaaggaggtgcgctggaacataagcaatgcaaagaattggataactataatcaatatcacttgcccggaacaattttaacttcagcattgaattagtgctagtttttatcccctataacaatatagacaaataaacaggccgcactatcttgtacagatcgttgaatactcgttgaaacattctccagagcccaatagcacaaaacgatcaaagttgaagtaatggcaatagaacatcagcagttgatgaatatggtacagggatgaacttcaaccacacgtatcaaacttaaataagaaaagcatatctcaaagaacaatatgaaaaaaaaaaaaaaaaatcattcttattgcctccaatcttcactggcataaactgcttgatctccgagctcctcctcaatccgaagtaactatcaaaattcagatggtaactgttatgcttttccttcgtttcactttataaacgagaatagaatacatacacgacaaatatcaacttcatctctacatgagactcacagctattgcttttaatatgcatgttattattaaaagaatcatatacagatattgccatcaagccacatagggtgagaagcctaaagaggaataacatctacagactcaggtactagtacgactgctattaaaacaagacagaacaaattagcatatttacaaactttaatgaacaaaattacaggttataaaatcatcacttaaacactactgatatcacaaatatacaacctatcatagaaaactgccaccaccttcccatgggagaggaattggtgagttgacaaaataagtttggtaaataattttttttgaagtattcaagaatcatgaccataatgcatgcagtaaaaccatcagcataaaaatcagaaagagacctggttgtacttttctagccgctctcctctgcaaggagcgcctgctttaattacaccagaagcaaggccaacagataaatcagcaatgaaagagtctatagtttctccacatctatgagacgttaccaccccccaatgcgcttcctttgccagcttcaccacttcaatgacctccgtaacagttccaacttggttgacctagattacaatggtaaatcaccacattttcagtgtattttcttcaataaaacagaagaaaaagtacagaggaggatatttaaaataccctcccaaatgatttataaaaataaataaaaagtggcaaaactaaattacaggcaagctatgtttagatttctttttcttttacataaactagctttgtaatttacgatcttgtatttgcatgaaaaagatatttgtggatatccaacacctcaacttagatctgaaacaagattgcttccagtccatgaacaactaagtttactatttattattaaaaaacaataatataaaaaaataaaaacatgataagattaaattttgtcattaggcaaaacagacacttgaaagttaattgaagaaacagcaagttaccttaagaagaagggcattacatgcagactcagttattgctctctcaatgcgttttgcatttgacatcaagagatcatccccaactacctgcagaaccattcaaaatgaagggaaactgtaaaaacagaagttccaatcagtagccaatatataaacttaacatctcggtggtaatatgcaaatgacctttctaacgctcacaaccccaataatgtgacaaaagacaaaacaattttatatgatattgtttttcctcccttgttcacatagcctgctaatgagtcaatatggcattgatacactaacaatcagttggttattattttctattaaaaatatccattgctatcattaaaaaatatcatgtaatctccaaaatgataaggtatacttcatagcatccatctttggctgcacaagttaaccaggacagagattgaattcacattaactcaaacaaaatattaattgattaaaaaataatacctgacaaatcccaagacttgagatatgcttgatatgttcccaatcttccctgtcaaatggatcttctattgacacaatagggtattctacaaattcaaaaagaaaaatccaaaataaagacaaagcataggctaaataatttataatgtcccccatcaggaaaatactaagataaaatggtttaccagagcatagttccttgaacaactctatcatatcctctgctgacttaaaattctgtccagacttttgaggagattggaagtccagatcatatcttttacctatatcagggaaaaagcacatacacaacagtagaaactggttaaaattattcaaaggcaaaaggtgcccaaaaagtacaagggggttttaacagcatgaggtgaggcagggtgcatcacagaaaaaggcgttaggggctgttagcaacttagcattagaaaaagaagaaaccaatcaacagtgaaatattataatattttgcagcaactttccatataaattaattatctagtattaatattaaaaataaaacattaaaatgataaattatgacaataagttgataacaagctctacagattaaagttcataacagtcactcatcatgctcatcctattggcttttaaaaatctaaccctagattcagaaacaaagctgaaatgacacccctaaatagaatataaagatgacatattaccatggccaaggatggtcatttgtatttatagtcattattgaagtactattatcaaataagagtactatttttgtatctcttagaaagactagttttattttgctatgaaagcaaaggataattaatggttcatatttttcataaatgacgcagtaaaacagttagcatagcactgctgcaacaaagactctcattacaatagctataagcaaaatagtagagcaagaatcaccaaattccatcttcttgagaatctaaaagtacacaagcgagagaaacttagaaatacctatgcaaaaatttgtagcagcaacatcaagagctatctttattttctcattataaccagttctgctaatggcctccttcacaagatccagggcttctctaaagctgatgatacttaaacagtcagctaataggtagaagtaaaatcaaaatgcttaatataacaaaagatttctttgagtggaaaaatacttaatgtaacaacattagccaagtgcaaatttcataaatattaagtgattttatattttaaaaactatagtagtttggtattaaatctttagttgcttaaaaatttagataattagcttcaaataacattaacaataagcaaaagcaagtacataaaattaatacaaccaaccctttatattaaatttgataatatattctcttgaaagttaacttaatctattaatctactctctcttcttttcatttacaacccatattctttggaattaattcttcatatcatgcttataacttcatcttagattctagttttatatttcacctgaattttaaaatattcatgcgcataggacactagctggttttattaatctttaaaaaaagatgtaatcataattcataacatgcatttaccatgtagaagaaaacatggtaattataacatgcagcagttcaaaatgttggctaaaagaaagtgcaagttagattaagaggcaaaatacaaatgaaattctttccatcacatatttatcatagatttcaaaggaacagggatatcatatcaatgtatccaagaaatcacaacagacagtaagagaaattacagcagtaaaaccagtagtttggagatattttttgtttttctttcctttcttctaaaatggagacattttaccccttttatattattcatttaacagtgaagaattttacagaaatttgtggtgcagtggttccatgtaattgaccccacaaagtggaaaaaggctttgttattgtatttaacagtaaagaattttcaaaagctgtagaaatccaataaaaagcttgcctggagatattaggagcaaagccaccatcttcaccaacattacagttatgtgcaccatatttttctgtaatgacagcctgcccttttgtcatcaacaataattaaatgtatcagcttaaacacgatatcagcaagtgattattaggattttttaatccatcattgatcaaaaaacatatatatgggctgggaaacaacagattggattgtcaaatcaattaaaaccaaataccaccatcgtaggaacagtaagcaacaacaaaggaagactatagtagtaataacataggatctaccgatctaaatcattgtaagccaggtaaacgacaatgtaaccaaactcaatgcaactaaacttgatatgtttctagtttgggaacattgcaatgagtgaaattatgaggagaaaaaaagtccctaaagacagaaagtaaaagcaataggattggataaaaaaagaagaaataaagcaaaaccacctttaagtgatgataggtctcagtgcccattcgcaatgcttcctcaaatttgcttgctccaattgggagaatcatgatttcctaataggaattatgtaagaaagatttcataattaaaagagtctaaataactatgaagcagaagaaacacagattaaaaagaaactatatctgtttatgtttgctcaaaaaataaagaacagaatcaaacacaacaataaattgccaaagttatgccataaataattgaacaggtgttagttacaacaaaaataattgaacattagtcatttaatttcactgttcattagtttctttggaggaaaggaacacatccctaatggaggtaagattatgaaaacacaaatgagaatgtctaagaaattaaacttcaacagaaattatacctgaatggccagattactcccagcatgttttccaccacttatgacagtaaaggcaggaacaggaagtgttgggctggtttttccagacaggtcagcaatatgcttgtaaagtggaacctgtatgtttttgtctttattttcatgatatcatgactgaacatatatactaattttccagattaaaagttaaacaaacttataaaaatattaattgttagagagtcatgcctccttttctgcagcaccagctttacaagcagcaatggacacagctaatatagcattggctccaagttccccctgcagagaaaatcagaaacagaacagataatatatatatatatatataatcttacaaaaattgggagacctatattgctaagatgaattattcaacaagcatgcactagtatctgatcgcaacaagtgtatgatataagaatcaatgacacacactgccttcatcaagcaaccattcaaaactgaaaaggaaactaagtatgcacatactaagtgaagtgcaaataatgcttccaaaatatcttgtatgaatttatcatatttccaacagccaaacaaattctcctactagcctaagggagcactttgtaaaagaaatggaaaatgaagagagagaaaatagaaaagtgaaaatatatggagatgcagaaggaaaactacgaccttcaccacttagagttgtttccgaatagcaacctagcaagcactatcccaattgtatccatcacataactaagaaaaactaaaagttatgtatcctggactaatgaaaaagacagtaaaaccatactattaagactattaaaccttttcatagcatttttcctaatcactaaccaaattcattttgaaatgtaaaataatcaaagcatagaacacaacaatatgtaatacggtaaatcaacagccaattgattgaattcatagcagagagagcgagacgttaaattaccttcttctcagttttgtcaaggtcaatcatggcctgatcaatctgcgactgaagcgtaggatccataccaatcaacgcctcagatattttgtcattgatatttttaacagctttagccacgccatttccgagatacactcctttgtcgccgtcgcgtaactcaacagcttcatacctgaatcgaatcaataacaaaccaaatcgataattgaacgagagcgattgataaataaataataataataaaaggcttacatgctggtggagttgccgctgggaacggaagcgcggaacacgcctttgttagtgtgcaaatcgacttcgacggttggaattcctctgctatcgaggatctgcctcgccttaattttcgttatgaccgattgcactgcttttctcatgtgattcgactgcggtcaccgaaaaaacgcatgctgagaaattccgatgagagaaacgggaaaaaaatgaaaagagatgatgagaggtagagagatacgatgaagagaacgggatcggaggttttggccctaacggcggcattgacggcatcttcgagttttcgggaaagcatgtgcttgtccaggtaatcttgcactgacatctccacaatcagctgcgtcttcttctactctccaaattctcactcacagctgagaagatgtgcgtgcccttgctttcttcttctgctgggaaaacgagattcaacactgatgctgctgcttcgtcttcctagtgtggcagagactagaaaaccgttcttgttaaacgtcgtcgtatcattgtataaacaaatcgagtttacttttaaattttgtttatttcctttattccactaaaatataattcaaatggcaaaaaattaaaaataatacaattaaataaaataatttggcaaatggtgcaaatggaaaaatatttgggaatctggggtactcaaacacgcccaaaatagggcgggtttaacccgccctattttgggcgtgtttcaccagatgttgacacgtggtagtcatgcagacggggtatggtgtgatcgcaaatttcggaaggtcataacttttgactgggatgtccgattgagacaaaatcggtggccacgcgctcgaaattgagagaagaagccctggtcaattcctaaagtgaacttgcccaaaaaattttcccaaaagaggcctctaagtgcctcaaaattgcgatttaattgttgaagctacaaaaaatttcgtgttttctaattttttatctattcaattagtgaattgcaatctattatttatttatctaactatttctcttaatttcgagcattctaacataaaatacgtcatcatcggacattgctacgagaaattacaactgttcaaagttatatgcatcgtcgatattatagtctaattttgttcaattttttaaattatttttgcgaccacaacaacatattttttaggatttatggtttagggtttcgggtttaggatttaggacttagggcttatgctttagggtttagtggtttagtgtttagggttaattaatccaaagccctaaaccactaaaccctaaaccactaaacccgaaaccattaaaaatctacagtaagaaccttgacatacattgtttcaacttatgccaagtccatcatcatatacataaagaagaagcaaaacagaaccatcaatagttaatcattaacccaaagccctaaacccctaacactaaaaccattaacactaaccaattatccaaacacactatctcttagccctaaacacataaaccttatccctctaaaccattaacctaatccaacagttaatcattacccaaagccctaaacccctaaaccgaacccactaaaccctaaacaattaaccaaatccaacagttaattaacccacaaccctaaacaaatgcataaatttccaaaattatactgtaaaatggatgatgcatataactttgaacagtcgtaatttctcgtaacaatgtccgatgatgacgtattttatgtcagaatgctcaaaattaaaagaagtaattagataaataaagaatagattgcaattcactaattgaatagataaaaaaattagaaaataggaaattttttgtagcttcgacaattaaatcgcaattttgaggcacttagaggcctcttttgggaaaaaatttgggcaagttcactttgggaattgcctagggcttctcctctcaatttcgagcgcgtggccaccgattttgtctcaatcggacatcccagtcaaaagttatggccttccgaagtttgcgatcacaccgtaccccgtctgcatggctgccacgtgtcaacatctggtgaaacacgcccaaaatagggcgggtttaaacccgccctattttgggcgtgtttgagtaccccagattcccaattattttcccatttgcaccatttctcaaatttttttatttaattgtattatttgtaattttttgcctaattcaaatatataaagaataaattgtgatatataaaaagttagtttacatttataataattaccttcaaattatatctactcgtcatggtttttaattgatttcaatataaaaaactttaagctaataaagtatagaaattaaactctacctttaataaggataattctaaatattatgctgttaaaaaaaattgatactaaaagcctttaaaaaaaacacaaaagtgcatcatttttcacaaaattaaccgatttataatatgaaaacttgtttagttcaagaccattatgtggtagcgatcttaagcaatttccatatggtgtataattgagtttttttagtttacaccaaaaaaaataataaaattcaattatatgtgtcgcgtgaagtttgaccaagatcatgacggtccgaaattatataataactactaaaaaagatgagtttaagaactccttataaaaaactttcatgtatcaccaattaaagatgggagtgattaacaatgttataagagcaattgtaagccacaaatgactaactactctgatcaattattatgttcacccaaatggaaatataaggaaattggctagttgcagagaatttctaggagaggagaaaaagaatagtgaataacaaatgatatccggtggaatcatccttgatttaatttagtgtattgtgccacagtttagtacaataaaccacaatatagtagaaacagtgttcgaaccattaaacatgtataatcaatcagtatgcccccctttactatgcaactacaaatgcactagatgaacctgtaaagtgatgaattgaacctaacaagcccttggcagccccaaaatgtttgattctgtatacaccaggagttacatcctgtgggattctccattctatggtagctttactttgagaactgagtttgaaaggcctagaccacttgaagcgcaggcagaaatcatcatcatcaaaagcaggaacccaagtatcctttccttggagaaattccaccagggaaaatgtaccttcagtcataaggtcattgcgagggcacgcagaccagaaagtaacagacaccatgtcacctctcttaaaggttgagttcttgggaacatcagagctacaatccccaaactttacaccaataggggttgcatccatcacaaccggtgttaataagcttatttgcttatcaaggaggtcagggggttgtggacctggttctacaggctggccactgatgagagcacgcgcaagcttcgtaaactcctgaatgtaagcactcagtgtgtgtggaccgtacagcgtggacgcaccctggtaacatgaaaattgaagttaaataaagcagcatataatggttacatctcttgccaatatgaagttatgttatttgatgataagttgcatccctaaaaatgtaaatttccactaatgttgcatttactcttgctatagcaatctaaaaaggtttgctgcatgcttcatgtctctttccacaagagttgtaactgacctcatatctctgcacctggtactcttcgtatgtggtcacatactgtgaataactattagtcaaccccgcaataacaacatgaatgttgctaccaaagcctttgctaccacttagcactgtcttcactgcatcacgaagacgcctcccagccattgttgtaaattctgtcagaagtaaaacaattacaggaagcatgaagcacccaaagaaatacataggccagattagattgtctcacaattcacaaatactggtataaaaatataaatatagatctgcaaggaaaaaaaaaccatatataatataatagcacaacatattaagcaacacatttggattttggattatatcggatcttaaaacatttagacacacaaaaataaatagtgagagactcgcataactaagatgcagccatcctttggattgaacccagtattgctggaatagacatcatcaaaatatcatgatcccaataacggttcaacatttttttttcttctttgactcaatatattctcattcgaccaaggttgttgatgttgaaacttaaatgtttcaaaatgcaaaggatagaaattccaacaataacatcattttaagaaattaaaaataagagctcatacctcctggtacactgagaataacaagctgcccaactcggaggatctggataggaagtattgaaggctgcaattgaacatgagcaaataaaggttcaaattagtaaaagttatcaaaaatcagactctttgtttcagcagggagagcatttccaatcagggccaaatgaagaaatatttcctttgaaaaaagatgccttgtgatggtagcatatctttatggcagaaatgggtgaagagaaacatgaaactaccatcatcaaagaacatcaaatgagtaacttactgcccaatcatatggtaacttcatttcgccagtatcaagcaaaatgggctttgggcggtgacagtctatttgttccttgcctggcgttttaagtaagttacggaccagcttccagaaaggatttccctgacatacaattagaaataataatcatagagtttcaaagatatttaagaatacaaggccaggataataggtaagcataaggtcttatcagtggttacctgatcatcaccttgcttaaagtcaaaagctccaggtccatctgttgttccagcagcaaatgcaaatcccattgcagcagggcatgtctttacaacctcagaagctcctactttagaaggatttacctcaagctgggagaaatctatgaaagcatgtcgaaaatcaaccttccctttaatctgttcagatgctccgttgaatagctccactgcttttttaaattgtctctcccctataatacgtgtgctttcaaattcatctggataactgcaacatcagtttataggagacactttagcaaccataaaggattaggaaaattgtagaaaaacaaagaaacattgagcatgcaataaaaattacccaggtcctcggccatagcataattcattctttcctccacatgtactatgattgaagtcacaaggtagtccagtgtctatacaaaaagctccgagtacatttggactaacatcaccgcaatttgtttgacaaaatgcagaaacaaatctaggcttgtcaacctgcctaaggacacctctcacacgtctagcaacgcttgaagttttggttgcaggtttaccaggaggagattggaatgaggcagcaagttccagtaattcatggtctggaccaataaatttaagtggggttagaaacgtattcatttattaattattattatcatcatcatatattcacctaattgataaactatttatgccacatatataaagcaagatatcattcatgtatgtttcattagttttctcaatcagtcatttagggtatttacatcttgtcttgttcgtagacaactccattaactccaccaatattaggacttatatgagaagacttgtaaaactcagaagcaccggatcagagctcagaatacatgtaactaactacaagaggcaatccagcacgttgccaaagtacaaattttcctcttgttgtttggtgattgctctttctctttggactgttttaaggcttgttgattttctacagcaactatttctctgtaaggataatctaatatattctaaaatatgattagaaatttttatacattctaatttctaacacaaaaggggggaaatcctttggtcaaaccacatttgaagcctttaccctgcaaggcaaaaacattctagaacagtggacccacatcacgtggcatataaacctataaattctgaagctatgtaatgaacatactgtaatggaaaagaagctacttagtttatcaatggatgcattgtagccaaaagcaaacatcttacgattatcatgaaggctgggaattatgtttgaaattcttcgggggattccatcattttcaaatccaaccgaatctattcttacagacccttttcgctcaaaccagtcttccataaatcgtgcagctgcacccttattatccccgctaattaatgagtttgttcggctcattgaagtaccatgagtagcaaaccaattgaaacttcccaaaggaccccattcatcatcaacaaactttaacagagtcatttctttatcaacatcatacttaaatttgcttctctctgcagcaggattgttgagataagcactaggactgcgatttacaccagcatctaagagctctcctgcaagttgaagataatttatctcaaaccatgcgatataatcaacaaagagagggagaaatgacataatagttaaaccatatgactaccaactagtgcacttactagaaatcacattgatagcttcaaaataatactactaaacaaattcttaatacagttaatgatgtcaggaaaagtaaagatgggaaaaccctacatcctataagaaaaagctcaggcttgcctcattcatttatttctagacagttggtgcaacttgcttcttgcagtttttcatctttttctgacatgcttcaacagtatgcaaaactaccataattataataatttacacataacatttaaattatccacctgtgctcacatctgtatacaaatataagtacccaagggagaaaggacaaagaaggaatgacaagtctttcccttacccttattgacaaatattgatcctgggcggagattttcatgggcctgaacaatggttttctcaatgccatcaacaatgacatcaaatgactggcgaacaaatccaagagatgtcacaatatacacaacatactggagataacccccaggaccagcatgagtgtgaattccactaatagccacattcttttcagtatataggtcaccatatctgtcaaacaaaataaagtacaaaatcaggcacaaaacttagggatcaaacaaattaaatggaaacatcagccgcttttcacgctagagaacacaatcgccggagaatcctaaagctcaatatgaactcaagaaaccctggtgagactctaccaatcataccctagtgtgacctgggttagtcatgcctatataacaagtgtgtcctcccacggttcctgcttttttttctggagggtggagtgaatggtgccttagtcacgcgtgaggaggatctagacctttattatattcggccttaagatctgagaggtccgttgactccgaaagccttaggacccctccatagtaaatgctcggacttactagtgtaggtcagccatctgtgacctacttactcggccgaatggtccatagtccctcaagcttctagcctgaaaggcataggcagttatttggtcaactatgcctcggcagcttattcggtcgggtggtccagctgccactcacagaaatataagaaaatctcccatataattaatcttccataatttctacaagttattatcataatagttatttcttgagagcaaagaagtcattattgataccttgctttcagcctctcaattactttgatgactacaagctgtgaagccatgcaagcgtcgaggttcacaaacactacccggttaccctttggctgagcaacaatgaaagcccgagcccgcagcctgaagtgaaccccagatgcaatttgctcagtgttggcataccccatcatgttaacatcagctgcaggaccggtaatgtcatagcttcccataccaatcaaggaatcagaagccgattgcacaacatcactcttcagaagtagcaggaacaagaaaagggtccaaactcgcatagtaggggaagggaactccatgacacccaaattcagagaaaaaacaagaccagttttctttttttaaaaactcggccagttcttctcatctcccttcacaaatcacacccacaaaacttgcagttattacaaaaaaacgaacaacaaaatagaaatgaaagaacttccaaagcaagcaattccaaatttgcaatcagtcatagctagaatataaaaaaatatggttcaacatagaaaagcgtaggaagcaataaagggcaatttagtttctcaccactcagatgaaaagctgggaatgatgacatgagcatgtcgaagtaatctaagttatctgtggattgcagagaggctgccccaataaatgaaaagggaagaaaagccaattgagagagagagagagagagagagagagaagaggcagtgtccaacggagagaaaggaaaggaaattggactggttggtagagacgtagagtggaggaactggcacgggaagacacggacgtgcagtaaggggtcatccaccctcctatttgaaggttcctactttggattgcatggaaaataatttttttcatgctatatgaacttcattcgtctgaaagtgtgacaaatttgtgtgggagatattgaacacatacacaaattatatatttttctcttaatataatttatttttaatcaaagatcaataagaattcaaataaatattaatcatttaattaaaagatataaatcattaacacttacttatgtgtgctgttttggttaatattataaatattactgatatagagtaatatgtaaaaggaaaaaaaactaataatatacattagtttatttttctttataataactatatatcaaaaatgaaaactattatgcatgcttattaaactctttcaaaatcaccacttatcaattttgagctaagtaatacaaaattgttaaataaacaatagtttacattattttcttattttattgtttaagataatgtacatatattaagaaattaatttattatattaattttataataaaataattctatctaattaaaacaccattatttcttaaattattaaattccttatataattgtagttatacttttactagtctatttattttttaagagtgttatgaagaatgtgtccaccttaaaccttaagtcattagtgttacttgcatcaaagtaacactaacttgaagataattgttatgagaattatttcaaccatactattttagatggcatgtgaaataaatgagcacaattataagttgactaaataataaatttaaaaaatatttaggcatgtgactacacttgcgctaaagatgtctatatataaatatatccttgcacaaataagagtattcactccttttcatttattttcctgcaagtatttctgacttgattattagagtccatgtgggagaaatcaccttagatgtgaaaccttcacaaagattccagctctatcctgcatcacaacaaagtgttattataaaacaaataattaatatattttttaaaaaagtgataaataaaaataaaatgagatagatatattaatgaatttgacacactatatgaacacaagtagatctaaattaagtggatcacatatttgcagttagcctataagtaaacgaaagtgttgaaaatttgagggataagaatcatgttcacatgggctaaaaataatgctttgaagtaggcgcagaaaattagtgggaactggtatgatgaattattttgactaaatattgttgccagttgccacatggagtaatggagacatggagttcgatcttggatcttgaagttcctaatattaattctgtctccacttatctgggtttctttttttatctttctccattgaatgggatcaacaactttctataatgatataaaggaaaataaaatatgtttacggttcatgtgatcgattgataataatgcgttggatatagtagctagacatttaataccaaatatgtttttttagaatttaatcaagataacttcggtattttttaattgtgagtgtaaattgtgtagtaggagataaccttttttatctttcaaaagtactattctcattggtggaggcaaaattaaagtttgtgtagttatatttcattaaataaaacaacacttaggtgttcgaacttaaataacgataaaaattgaaagagaccataagaaaattcttcccgaatcaattagtaagcttgtgatatgtggacagattcattggtttgaatctgaatgtgaatcaacaaagtatatgttggagaaataaacgctttataaataaagctcaaaagaaaaaatgatgaaatacttcgaagttttcttactctgttttaagtctaaaatattttatgtttctttggaagtaattttaaaaataattaaatatatttaatttttttagttcaaatatttgagacattggatagtatttttttttcaaaattgttttatgcaaacagtgttcatgtattcaatgttttgatacatcaaacaaatataaaaattattcaatatttatttaaaaataattaacaatattttctaaatatatttaatattatttaattaatattttaaagaaatttgttaaagatattttcttaagatatgtactccatactttaggcaatcaggaatgacagattctggccttggaaaacattccaacggatgcgtggaagtcaaggcattcacacaacacttggagagatccaaacaaaatccaaatatgctccattaagagtaaactagaaggatcatcgaagctgtcgtggcccatttcctttaactttttcattatattttcttttgtccttttcgaagaagaaacaacttcttttcacattcaaaattcaatagtggactccaatcataggataacattaaatatatacaccagcactaaattctttcatgtgcgttacaaaatatctataaacacgcgaaattgataaaaaaaaaaaacccaaaactgcttaaactgaaaattacaaaaaaaaaaaaataaaaaccgtatacttttagtggcttggtttgattttttgatcttgtcattaaaatctaaccaaataacacattacaattatattatttcattgaatggatgtttaatattatgtagacagtttttcaattttaattattatagtatgttatttatagtgtatttttttctataataagtttataatatatatatatatatttatcataataattaataataagaattaaataatttatgatatttctttttgttttgtaatcaagatacatatattattttcatatgttaaaaaaagaaattctaatattatttaaaattagtattaaatatcaactgatgtaaaatttattattatgttatgaaaagagttatttttaactaaaatatgtttttcaaaattaataaaaaaatattttcaaataataaaacataataataactatgtaagtttgatcaataaaatttagattgtgataataacttaaaaatataaaaaattgtcaaattaaactataaaagatttgttttacttaattcagatttaatgatatatctaaatcaaatcgcatctttttattttatatttatttttgattattgaaagtaaacggcacccgaaacacgttactgtcaacgcctcagaattaactaaaagaagaatttagcgaaaattaaaaacctataaaaaagagtatagaagtggaaagtgaaagagagggcgccagttttcaaatactacaatggggtccagcttgaacaacactagtccaatctctctaagtctctattatccgttccgttcataaatttaaaacttcgcactttcttcttcttcttcttttcttttttctttttttataaaggacgcacttactcgtactcttacccctgttttttctcctctcgtaagaaacaattaaaaataaataaattcgccttctcgtcggcatcgtaattgtggaactagaaggttgttgcgccttctcctccgccgtgcatgagcttcctccgccgccaccatgccggcaaggcgtccctcctccgatctgatcctccaccgtctcgcctcgtccgactgcgaaatcaagctcaaagccattcgtgaggtcaagaaccagatcatcggcaaccgcaccaagaagctctcctatatcaagctcggcgccgtccccgccatcgccgccgctctcgctcaagctgacgccgattccgcctccggctccacccccatcgtccagtccgccgccgcactcggcagctttgcatacggcgtcgacgccgctgtccgcgctgtcctcgacgccggagcattccctcatttaatcaggctcctctctgccgctgacgacaaggtcaattcgattaattacagcgtttttttctttttgaaatttcttttgcgtgtttggtttctctgacattggtgctaagatgaaattgcaattgtaagaagaaatcaggaagcactgcttatattgcattgttgctcatgttgataaattggaaattaggaattgaatagctcgcgtgaaaatagctatgtgcttgtctcataatcaacaacagtttgtagagtgtacgcatgctagattgttaagttgcgagttgttgatgtattctatttctctccttttcttgctaggtttattacagctaaaactatatatatttctttcttagtgatgaacgcggtacactgattagagatagaaagggatagaaaaatggagcggtagagtgtttgcgaaattcatctataggtagagaaattggaagggccaaaacttggatggtacaattggaaataaagaggagtccaatggttaatctcccggtaacttatgttttactaccgttacatgaagcatttttttttttttttggaacaaggagactctctaagggcagaacttttggctatagagcatggtctggaagtctgttggaatcttggctattacagtgtggtgtgcaaaacagactgcaggaatgcagctgaagaatctatggaagagtgaatagattggcatgtgcatggggatgtaatttgtcggattcaggatttcattgggaggggctggaatgtctcactcaatgtggtgtctcgagacattaattgtgttaccgatttgttggcttggtggggtacaaataataggtgtgcgacgcatgagtggaagctgccacctgtctttttctcgttgcgttaggcactgattctttgtctctagtttagttcctttgtatttctttccgtacatgtaccaaataaaattatgattttgtttggctgcttgcagtgggcatttttgctgttgacaattcattttgaatttctttttaagaaatttttttggtaaggataacagaagttttacccgctcttcttgcatgcctatctctttacctgcctacaaatacaagcaaatatacattgatttgcacttcttcctttagttttcacctatggtaaaatcatccttgatttgaagaaatgtatgttggcttctaattaccagatgtgttgaagagtccccttgatttgtagacacaacctcttcatgaaatatcaaaaagccaattaatttatgataaacagcagttgtgaggggaaaataaatgtattatgatctaatgcttctataatctttatgaattggctgtaacggtgtgtaggcattcattctagttcaatgcagtcagtggggtgtggacatgatttaccaagtattgtcactttgtatatcttatatctattccgttttaagctatttgctttcatattttagtgctaggatgaatggacagaggttacaggaagtgcatttgttattgtttctatttgatctttaaatgttgaatatttttcaagacttctttatgccttttattcatttgtggcatgtagtaggtagaacaaacataccagtccttaacccttatacattaattatcattgtgataagtatgtgatatgactgtattttttttccaaatgtcatctaatagacctgcctccccttgatttcaggttgtggatgccgctgcatgctctttatgaatgatttatcgatcaaaactagctccaaagtatgacttttttaaagaacaagacatgcaatttcttctttcactattgaaaagtgggaatgaaaatcttactggactaggtgcaagcattgttattcattcttctgagaaaagagatgaacaaaatatgttatgctgtgctggtactttagtttagaaacacttattagccttcttgatggttctctaagccagcgagattctagtttagaatcccttactgcaattcttaaaaacaatccagaagttgtctctaaatttgtggaccttcaaaatggaagagctttgagttcggtaattgaactaaccaaggacaggtattcttggactaggttactagcctgcttgtgcctgattagtgtaaagaattcatcttcttgctatctgcaagacataggaatcaaagccaaattggtacatattttacttgagttccttgatgattctggtcaagttggagacaatgcttcctttgccttttcaagtttagttgcagaaaaagaagatttgcagaagttagcatttgaggtacatgctattgataagttcaacagtcacttgcaaaactgtgctttacatcccaaacaacttgaagggatatttctaaccttagcagattgtaaaacttttgaaacagtcattggtggaatacaggcattacaatgtacattggtatcaatgttccaacttaatgatacatattatgattatgttatggtcctcctttttatatctccttcctccctccctctattttgggttgttatacaataggaggtgcaagcacttgggttggggagaagggaaaggtttcatcaaatgtttttattatgttgtctcatgattttatgctagtgttctgtcagagcatagttagtactgtatggaaaagctgttttacccatatggcagaacagcatggtgaattttttaccaactgtcataataggcaatttttgaagggaggcccactgtggcagtgctataggccgcaattgtgtgtttgtatggcggatttttggctttctaccacattctgccatcccccattgataacaccgcaattatcaagaatcaactatcccaaattttttaagttattagataaagacactagaatgatttttatatgcatgcttcctcatgcaaaagccctatgggcttgaagcatggacaatgcatggtgggggcatggtatcagagcctctatgtccttgtcatatttctaacactgtaaatcagttgcataaaatgtttatggtgggcaacagccaacaggagatccaccttcatcatttttccttacttgtatggttcaatgaagtcatttttgagattaatatctatacctttagattacttcattttgagagcatggttctaacgttctgttaatgctatttgggagagaaaaatagaggaaattaataaattttggagatctcaaaggaaatgtaaagggtgaacaaagtatttttccctgacaggatagaaataacaaattaacacaatgagcatatgaaaaaagaaaactgcaattgtattgaaatcttaatcttcaagctgattatctttttattttgtgtaggggatgtacttactcagcaatattgcaagtggaaatgagtctcataaagaagctatcatgcagctactctctacaaaagcagaaaatgtgtctcactctttcttcaaccagtttctgcagagcaatgacagtcgattacgcacatctgctgtttgggtcgtagtaaatctcacttttcctgcaagtcctggggcatttggtaggattgtaaaactgcttaatgtaggcattgtttctcaaatcaagaagatggtcaacgatccttgcatggatgtgaaggtcttttaatcttcatttcaaactggtcttgttctatactctctttggagtcaaacataagtaaagaataactaattctcgctaattaagaatgttagttaacttcgtttaattttcttatatctcatttataaaatgaacttcatttcctaaatcatcgttcgtgctaattgatggaagacttcaattctctgggaacatgtttcaaatgggaatactctctccattttaaaagccatgtgattgatatcatgagaataaaaggagccattgaaaataaaatttgaattaaataaaaggcattttgggaatgatttcattaaatagggtggaatcaattaagattggcttatattttggaccactatacctgagtttagattcacttatattttggaccaccatacctgagttaagatttgcttatatttgagtctggaggaaatacttctcttagttattttgtagtttttttttttttttgatgcagcttcgtgcaagacaagcacttgggcagattattacttttggtgatagttaattgtaatcagttactccattcaaagcccttgggctgcagggaaaaagagaaatctcgatagattttattttctcccaattcccaccttatatgtaaggtgtatcggccttgtgcttcagcatcaagtatggtatgcttcagtggatgtatttcaatgacttccttgctgtctttcctagaggttcatttctattctatttatgcaggccactggaaaactttactaaatatgctattgaaaattggaattgttgactgttatttagttgttaattcctgcttaactttaattggttaatatgatataaagttggttgtagttaaatattcctatataggcacttcataaggatgatgattctatttctatctttgagatatgttcatatttatttaggctcaactgcgaagtagtcttttagttggggatgaagatttattttttcctcattatttttcatacttgctcgcccctgtttttagctttattttttgttctggtactagtttatcaataatatgtttctcttgaagttttttaacaatatgtatcatgttctactgtgtcaaattgagatacatggtttttttcttgtttcgctttgcaggtgtctaaaattacttgtatttttttgaaccagtcagagctgtgtgtgaagcactcctgaccaggttgccccgaagtctctttctctttcgctcacattgtgtattaccttttgtaagtcggaagatcgaagtagatttacaggctttagtattgtactgagtagtaaatgccaattttagaacttagtttcaatttcattctgatgctgggatattgacaaatggttggattctatgtgtaagcaacatgtcaaggggtaatgattgaggtgtattttgtaaattattgtgatgttttaatgaaaattctttgcgaaccatacttttttttgttgacagaactgcgaaccaaacttagcacttgtactttatacgtaacaacacaataatttacaaacaatgtttttttaggtatataatttaaaaaatgttgtttttttgcctttaattaatgttatatacatagccatcaagataatattattttaatttaaaggtagtccaattatattctatttgatttttgaaataagaggtatttaaattttaaaattttgaaaggtgaaaacaatcaacttgttattattcaaaagaataagatatgattccccaaaatacataataagataagatctattgctcaatttttttctttaatttaatttaactttgatgacataattctagtaaaaaagaatgaatttggaagaacggggggcggggaggaggaatatatacattaagtgactttgtattcatgctgtttgcatatgttgtcttttacagtggtagcatacaagtaaaagaattaaattagaacttctgtttgatttttttccttaaaaaatctttaattgagtaatttctttgagttaaatgagtagtaagtataatacaataatgtcttcagtttttttgaatgatagtctaattttgtttctttatatgaaaaacattttgcgaactttattttacttactaaaattaaaaaataagcattttattgatgaggaaaattaataattgaaaataagcatgtttttaacttttgaaaattactttcaattaaactgcacttctacttttttctgttcgtgataattgtaattctgcttgaggttgaatcatacatcgtgcaaggtattgagtaaaccaaccctgtggaagaaataaataatttctttacttttccataaacttccgaagctaacatggctaatagattctagcgattggttacactcaaacaaatgcctaaaatttttaatccctattgtaaatccttcatttcaaactatctaaataatggatcttatatggaaaggtatagagatatacacaatttacagaacgtatcactagcaaatctagtaagagaaaaagatacagataaccaatttagagagaaacagattgccattggaacaaaaaattatacctagactagggagaggtaagattaaaagacagaagggaaaagaagagatcgaaagtcctaacttatcagccgattttttcggtgtttgtgtcatctgaaggccatattacagtttccatgagccgttccctcatcaactccaagttttcatcagatatttcttgatatatctcagcgtgattacatttctgcatggcaataagaggtgaagaaaggttataatttggagtgcatcacccctttacagaagattatcacatgccttggagatcaaacgaaaagattgacatcgataattttgagttcaattaccttgatccatttgccataaaggtgaagccgtgttatcatcactctttcagcaagttgatgttgctcctagcaatcgagccaaaaaacataatgacatcatttccaatgttatcaggtaacacattgtgaaacgtaattatcaaaacaatatgtttttatagaaaattatatgaacaatatatcctgtggaaaggcattagacaagaaaattggaggtattgaatggaaggaaacacaaactgatcagtagtttattaagctatacaccgagtaattcggtagtagtttattgtgaaagtgttttcagcactgcaaaaagaccatagcatgcttacgaggatgatatttctttaaaccagcatcagtattggaaaacattgtggcagtttaacatttggcataggaagaaaacgaacagaaaaaacagcttaaaatagcaattcttgagctgcacttgaaatgttgtttatagtactttttaatttcaaaaaattaaacatgtaatagttcacaaaattgtagtaaattttcaagagagtaatcaaaagacaaaagactcaacttcctactctgaaaattatcaacaaatgatataactgagcagagcacatacctttgtgagggatcgtataaaatgtttcctatctgtcgggtcgtttgttgcaacgaaactgttatcatggaaaacaaccaacaattagctaaaaaattaaccttatactatgtctacaaaaagttgattaactttattatttgcttgtaataatctattaaggtccaaataaatgttgtagaaaactagaaattgcgaaaggtatcgatgtgcatttactacttgaccgctttatcgatcaagattcaagacttcttatgcaaatagatttcctgtattcacacattcacatttcggatacatattttaagctagattcatcgagataaaatacgagtctgtccgattttcattcaactgattagttgaatgcgtgaatgtggaaattccccaactgcagagaatcctaattcaacttttcataaggtgcaatcagagcaacttttcaactgggatcaagaatctatctatgagataccagttcaagtataataatcaaaccgaaccagagcacttccattgctggcagtggcaagttttgagagtagtaaacgcacacaaagagttctaattttacaataattaataaaaaaagagatacttacagttgaatgtatgcaatcttctctttttcacaagttcattcagtcaacaatttagaagcttacttaacatgtgactgaatggaaacatcattttttaaactaaaataaatagtaattagaagagcatagaagtttgagtggaaattagcattgtagctacaacaacatagatttcacttacttatagaaccacctatactgaggtgggttcatctcatacaactgttgaagaacagtcctcacagccttgtatgtgaaataattgagtatttgctgtatccaaataaaagatgaagccagtcaaattgcaagcaaggaatagtagtatactcagtggcggatccagaaaaataatcaagagagacactagtagcagattcaggagaatttatttatgtccgcacatttagtggcgggattcgggggcagcgcctctgcaattttttttttgtaaagaaaatttaaaggaacaaacaattataaatcataatctaaaggaacaaacaaataatcagaccaaattattattctggattgaatagaacaatgaaagaaacttattgaaacttgcgatgagatttcaaaagaccatgatgacaacatgagagttagtttagatataaatattgagtttgagatctttgaatatgaaactgttacaagatagactaaatatttctacaaaatacatatggttaaactgtacttctcatttcaatgaaaataatgactttaatcatcttataaacaagtactaatacataaattacaaatgaaaataattaacaaatactgcaaattatataataaacatttaaaataattaataaatactataaataagtactaaaagtatattaatattttaatgacaaaatttaaagtgtccccaacttataagctagatccgcccatgagtatattatatacacatagcaaaataattaattaaatattcattcacaatgaccctggagaaattagtaaataatctcggatcatcatctgactattaatgtctatatattaacagaaatattaaaactttacaatttattagaagaattaataatacttgatcacatgtcattcaaatattcacaacacattatagtttcggactagctaagaatttatgaagggagtgagtatgttaagtagcagtacctttttgacatcatgaaaagtgtcctcatattgaccaccgagctcattgacaatagtgagtctcttagtcttgtccttgtgcctgcgatgcttcttgaaaattgtattaacactgtgactctgaacgaaggaagtggtgagcctcaacctcaacaagtgcttcctattgagacacaaaacactgatactggtactactagggctggtggccagagcatccacgtacaaacgtgggcaactgtgccactccaccgcaacagatacaccaccaaccatcctatcctatcctcaaacacagatgaatgatagaagatgcatgctcttttggaaaaccaagctcggatttttaagtgaatcttgaccaaacaattattctgaggtcctaaattttcaaactaacgttgcctttttcaattcagttgcacacttgggtttgtcaccaatccacgcacacacatcgcgcgtgacatttaaatatgatcgatcaaggaaaagagtcaactgagcatacatgggtattgccttttcctgctaagtgctagcaactagcaaggataacataatggaattgttcaactattattaatgataagagaatagaatctagatactttgattttttatctttgtttttgcaaacatattctaatttatatattatatatgctaatttgaattgattaatagtatacactaaatataaattctacttttagaagatttctaatcatgttataatgaatttggagctagggagacctttttataatttttttaaagatattattaatgtaattttttttatctttcaacaaaaatatttttacttttaagtttattgactaatgtttttaggatatagtgattaacatttgtcttttttctaataagaaataaaaatgagaggaacgtttttacttttcatgttaaacctctttgttgtttttgaattttgctagaatgagtataagatgaggaattatggtgtaatcactaaaaatccccctttttaatcaacattttaaagttaccccaatttaaaagaatttagaagattttaaacaagcaagcagattataaataaactctatactcttccctttttttccatttccctctcctccgacctttttagtcaatgagcatatactcctcattttatttatataaaaactcctttttgacttgtgtttatctatccaaaattgattagaacttgcaaaaattcttggttattgtacctcaacagtggtaaatgtggcatgatatgcatataatatatgtacaaattaatgtataggagcaaatgcatgacccacgtctgtccaaaaaacccttctagtaggatcctatatatggagaagcaacaaaaaagcaatttgaaaactctgtgaggtgtggtgtggtgtgattctgattagattaggtgatgccacgaggactagaagacaaaaactctgctatttttcaacgctcttaatcaattaaataattcacagacaaacatatcagtcagtgacagtggctgaatagctttggatcaatgaacaaaactctgcttctcggccacgggccactcagcgttattggttatgtagacagataacaaaaaataattattatattactatctatccttctcaaatctcaactgttttattcacttactacattttaatttgttttatgcagaacttaaacatgttaaacatctgtttgcattaattttccatctatttacaaattaactaataaaaatttattttaattcagatgaaaaaatatctacaaattaattaataaaaaaatattttaatatataatttttttcttctcctaaaaatatttttcaaaaaagcttattcaaacatgccagaattctactaagattagtcaaatataatttggaaagaaaattaacgttaagtttaaaattgaaagcaactatcacacctttatttgtaaaatgaagacacgtatagctcctgtccctcccctctttgtctttagttgaagaattgattcattttttctgtcacgtatgttaattattagcatgtttggattagattttttttaaaaatcatattgaaagtcaaagtaatatatagttttaatattttttttctttcaaaatttcaccttaattttgggtctcagaattaattatagtagctatccaaacaaaatttatatagctatccaaacataatataagtagtattgttatttaaaaaaataaaagttatatgttggactagcgtactaagttcaaatctcaccttgaaaagaaatttgaagttttaatattggactagattttattatttttaaaagtatataaggatctgatttgagaaaattagagaccaaaattatccctttgataaactactaaaattacctttaaaaaagattttttattttccttcttaatcacaaattttgttgttgtaaaatcacccatttgatataactactaaaaccactcatttgataaattaattgtggggactggtaatacaattaagtctttaaatagtgataaaaaataatttagttattaaatttcttgatttttgcataaaaattaattttgttgtatttttatagttgataaactaattaaaatagtgttgcagtttttggatagctaggaatgttattttgataataaataactttaattaaaaatgttacgactttcaaatgactttacagccaatagaaagggataagtggagaaaaaaaattattttgaataaatgtggttgaaattgtttcgtactctttgtcatttccctttttaattaaagttcaaaatttattaaggtcttaaaagttgtactaaattttgaaatctattttgataaaggtcttaaagttcaaaatctaaagctacgtgtggtagcctacaaactaatgtgtgcatgtaattaaaaactccaaaataaaagaatagtgtggatgtgtcaccgaccctttttagtgatccaaaaacttaaagtcatcgtacaccaaatataagtccaataggtcccagaatatttgaacgagccactttttcacccctctttgtcggccattctaatttataaccataatataggcccccaagacaagacgtatatatgtacgagtgtgaaaatctctgcctccaattccttctcctttttccctccctacctagggttaaatggaggtaaagcccaacaaagagataaaaagaatacagatataatactaattaatttacgtactttagtaagtgttagaagatttttccttcgtaaatgtgcatgagagagttattattatacacaactttatttttatatatattaatttggtctccttttaaagaaatcttgtcgtcttggattccttatttcatcacttgtccattctttagtgtaagtgtcatagtaaaaggagttgctttttcggtgtcagctactacacaaaatgttatagattctttcttgaggaatcattacttcatttcttttgtcatacgagagataaacataagaaaatttacatcaataataaatcatttataagactacattttaatcaaaaacttgaagttaaaatttatgaatctttttcacagtcatataatattcaaccttttcatttttattcaatctaaagcttcgtctcatacacttattacttcagcatttacaaaatcctcttttggacaaatatatatcatttccattttaaagcactctccaataggataagcttgtgtcctctcctgttacactagttagttatatcttctctacctggttaagtctcaggcttcttcttccaattgccagctttttgttttagaaacatttaccagttcttttaattaacctagcttatagctagctgactcacacaagcattttctatcaagacatggttccttctggaagtacgacaaaaccaacaacttcaagaaaaaagaaaaaaacaagaggaaagctggcaagaagccattgcaagaagcagcatgaagagagaagaaaacaagaaacaccaaagaaaagggacatggattctgatgttgctgctgctgtgtgttccactcccaaaggtgaaaagtttcggataccagaagtttcaacatgccctccagcaccaaagaagaatccaagggtgctttctgattgctctttgcgtagatcacccttaccattctatgcaccaccagacatagagaccttcttctgctttgcgcttcaagatcttcccgtttcatttgtttgctaatatatatatatatatatatatatatatatatatatatatatatataagtagacgatctcgtgaaactttagaacatgcatggacttttcttatgtacttttagttttttctacatctcttgcaaatgagaggtatatgctttgagagaaccttggaggattttggagtgattgatcttaggaacagttattcaccctatctttctgctaactttaggagggtaacaacttgtaggatttgtctctctctaaatttagctaggggtacgtgtgctctcctaattagatatagattttaagtttattttcttttttctctgttatatatagaagatatattttctgaccttaatttgaagggtgctgtgatgagtgcaaagaatattggttttggttgtagatttgagcgtcatagcttggaattctacaaaacaaaacatagtttagtcaagtggttgctctgagagaaattaaagtccatcatattatcatatatatatatatacttcctttctgttcaatttcatcttttattttatttcttctactaatttcttctgcacaactgatgatggttataagtttgatatttagttagtagctacgtaccttttgtctttaaaaaacttgtgtgggtagatgacccttccatttataacgataaaaggattttcgatcgttggcaaaattaatcttatcaaattaaagagttaaaatatagttataaattctttaaaatattcaggtgatcagatgccaataaacgaattgatataatatgggagaaaaataattaatatatttaattttataaaatgaaacatattttgagacaaaccaaaatataatgagatgagatggagaaattattttgttatgtattgattgtattttgacacatctaggctgtatttttaggagtttaattccgggcaataatttgtaattagtatttttttattcataagttgtaattggtatgcctaaatcccactaataagtgtgtgtattttggtttttggtttttcaaacaaaaaatgaaataaaagtgaaatgttattttaaaaatctgaaataattttgtcagatgtgtgactgtactatacgtgtctctgagttcggccccacagtctatgagaatccaatgaaggggtctctcttattagagaatgagaatctcaagaaatttctcatatttttgcttttattttatgttgctaaatgctacttgctctactcgcttgtcgctactcatacgggaatttatttttctgtgataaaataagagtagtggaattgatgatctatacttatatagtgtccctcaaatgttactattttttttttttttttgctacttggtttataatcattatttgtagcaatagccttgcgtgtgtaaatgtacacatgcacacagatagatactttggaattaaggttttaaattacgattgcacgtagtttcgtcgttttttttatattgtaaaaaattaaagataaatatatatataactacggttacaaatacttcaaaaatcttaacaaagtaaaattaaaaattagagtcgtagaatattttctaaaaccttattcggagtaaaggaatagaagaaatgaattgaatgttgtgtgtggtgtgccatatgtgatatgtggtaatatttttgtacatgtataaagaaataattaaggaatatccttgaataaggatgtatgattctttccaaggatctatttgtgtgggggtagttgtacttagaatttttttaactttttaaatttatttatatggatctaccatctcttaaaatgggcctaaaagatgtacatattatagaggccagaatccatactttccgacctatcgaattaattatgtgtaaatttaaatacaatatagaaactaacaaaatttggcatatagttgacagacaataagttttttaagcatacggattatgatttaattttcttactatatatatgaaaaatattttgttgaaaatagttatatccacgttagtaatttctcaactttgaaagagattaatttccaatgtatcaaatgaaaaattcctttgatgtacaaaataaattttaatatatatatttttcatttatagaaatcaaatttaaacaccaaaaaataaaacaactcaacagagtaaaatgaattgtgctagatgctcttagtttaaaaatatgtttaagtaatcatataacatataagtaactttagattattatttttaaaagtaactctatcactgataaaatataaatatgtcttataccttcgtaattcatcatgcagagacatggagcttatatgccagttcgccactactatttgcgttttttactttttagtgtaaaataaagtgactaaatgggaagcaaaagtgcaacctgaacacgcgctattgcgaaaaggtagcatgtaattattttgtgttgaaaaaatataattgaaattgccaatagtgcctgcaagtagtacatggggtacacaatagaaggttctagcgtctatgtagtgtatatgttggacatgtcactcgttcaactagtgtgtctaacataaatattttttaagatttttgggttagtttggtacgagaaaaaatgagagaaaaaaataaaaaataaaaaaaatgattaatgaaataatttttttgtttatttaaaaaaatgaaaaaaaaatatttttaaatacaaaaatttaaattttttcttccctcactttttttctaattcaaattttaattttttttcttttttatttttcttccatccaacccaacataggattaggttaatattttttaaaaaaaataaaaatgcttacatgtcatgaaaaaaaactactttgactggcatgctatttaaatctatagtcaaaacaaatcccctatggttaatattcgaaaataatcctatattcgtcggtagtttctaaaaatgttccaatttagtcaattaacccctaaagtagtgatatttttggaagctaattatcataataggatgctctaaaaccttaccaaatttgattattttaacattgatcaggttaacttgtcagttaaacaagtgggttccaaaccacatcaacatttttatttttttttaaatattttttattgagaatccacatgacacatcatgtccaaaaaaacttcacgatcataagcaaaattcaaaatccaaaagaaaaaacaacatcgagttcactacatatatatcatgtgtctagacacacaaagatgacattactaccaactaaaaaaataggtatctttgacacatggcaacatctagataaacctgctattttatttacgacgtgtctacatctacataacgacatcataaacaaaatccaaaatccaaaaatattgaacttcaacccaagacacataacaacacccagcaaaatatgccaataataacaataatttcttgataattccgtatagtattgatattatatatatggacgaacagcgggttcaatgcatgtatgttatgtgtctagacacattaaggtcgcgaaaataaaaataaaaagagtgactttgacacatggtaacaactagacaaacttggtagtatgcttacaacatgaataactaaccgttgttgttggcaataataataatagcaataatatataataataataataataataccttgtagaccattaaaaggattcattatagaaagccactaaacattagctaattgttgactatttgatatgtgaccaaagcgtaacttttatttattaattagtatattttcttctcacaaataatactaaatacgtataacaactcatcgcacattagtgttaataaaatataaatatttatttaagaatacaatcgaaattatttaaataatgcttgatttcaataacttccatttacttaaattatttgttatattttaaattattcaaaacattctttataaacttaaataatataaaatctataattttttacaatataattataaaataattaaattattatataatttcacttttaaatttgaaacacatttaaatttatagagtaaattcattactttcttctgattttataccagaaagaaaactactttcttgtgatcttccacgtggatggatatcgtccgaactgaattagacccaacaaagtaaacaaacattgaaccaaacatgattaaaaggtaaattcttactttatagcaaagttattaaaatcggatcgaaccagccagtcctactggttggatcgggaatcagtaacataaccgatttgattatactattaaatcagtcatgcagttgacttggtcaaactcgatcaaaatcagccaaatcagacaaatcggatggttttcaaaacccgggtttgaaaacgcacaccagaaaatgaatatggcacaacagaaaaacaaaaggaagagaaagaggaagaggagaggtgatgaacatagaggagaggaagaggtgtgcagcacatgaaaatggaagcgcgtagcagccacgcaaatgaaattggagaagcagcgacagctactcaacacctatattattaggattaggttatagctttggccttcatttgcttttttatcccttttattaatttctatagtccttttgactcatttttttattaaaaattgggtttgtattttaatttaattagttattatttatactctattttattattaatacactttacttatattaacaattttaatatttcaattgatattttgaatttttgaatatattttttaatcaaataatattagttatatatttatatataatataattttaaaatttttaatatagaccgattcaaaccggtttaattattgacccatcagttgaaccactaaatcactgatccattatcttaaccgattcaatgatgaaatcggtttttacaataagtatagtaaataaaataaaaggcaaatacttttaaaataattaagaaaaatagacgaagcccttaaattactccgagaaaaagaagaaaaaaacgacaacaacttaaaaaagtggtgccacgttttgcaagagatctcaatttgtttaatttagaagtgactaataaaataataaattgaattgtttatgggctgtgacgtgataataggtgtcccctcagtcctcactggcaggtaaggctcacctttcccccttttttaaagtaaagaaaatagagttaattatatggtggagaatcaattattaatccgaggaaactaaaaaaaaagatgtttacaaaggaaaatggacacgtgcctcacattgctgtcaattctcggaggctatggtccccacccttaggccacgcgtccaccggattctgctagtcaagtgcctgtcacgtggcccataaattgtgttcctttttccttctcaggggctctgatatcctcacccaccctccccctctcagatacccttttccctcccatttctctccacgtgtctcctccgtgaaacttgatgctgacgtcatcataagatgtcacttgaaatttaaacaggcaaggcaacactggactacatttgctattgttgttaagatttttttactttttattttttattttcactttgactcgtgaatgaattcctttatcctcatatatcacaactgaagtgagatatcaacattcagcaccccaaattctagttatagagaaagcaaagttctttgatttgccttcctacccccttaatttcctttattaatcaattgggaaatttggtctaattgtgattcattctctttgggggattttgaggattagggttagtattttctgtgtctgcatgtgtgaattctggcaagatatcacccaaaccttattttttttctatgacatgtgatgtgtgaatgttttctggtagcaaatgtgggagaattgggattttggtgcatgtactaggatcagataaactccaaattttggtgattttctattaaatgtagctcactagctagtgtgtatctgcttatgtgaacactagctatggttgcatgttggaatatcagtatatcacctggggctgtttggttgtgtgcctaaatatatggcagaaacaactgttgctgattatgattttgttcttctaggggcatttggttgctgggcactgaccaagagttgaaagattttatatttaccttcaaacagctgcggctcctgctgaagatcaagtaagagcaaaatggaaactatttttgttttaagcctctgtttgcttaacaagtattatatcatttcatgatgaattttaataattttgaatttgggtttctcaattttctttaagttgcacatgtcttataacttcacacatatgaggctatgaaactttttaatgtggctttactatcaatcagcatgctgcattttaagagcctttcattaatgaagctatgaacaagcagtagcactattgtaactttctgtgagttgtgcttgatatcatattgatcaatttgtacctctagaagatttggacatcaacgttcctgagacaattatggctatagttttcacttcacgtgattttgtttcagaaataccttgtttatccatttttttaattccattggagggtctcttattgtaaaggggaataaccactgtcattatcaacttttatttatcttgccttttgttttagcataaggaataaaatttgtaatccaatattcatttgtagggaactagggttctgaagataagatatgcaatccaaatctgaaactgcaaatcaactgaggtctgatccacattcctttacacctaaccatgcttattctgaaccctggtggcgaggtattcagtgcaatcctgtcccccaagcaatgtcaggagtgaatgcttctaattcatcttcacttgaacgccctaatggtgattcagaatccagtgaagaagatgatgatgccactaaagaaccacaacccactgctcctaatcaatcaggtgctttagattgattgtaaagaaaaatataagcattaaaataagaaaagaaaaaatttgcttatatatagtggcccaaattatgttcatttgattttttttattttagtccaagtgttacaaggttacgaggatattgaaatacaatattcttttcttggaaggaaattatggacaagaccaccaagcgatgcaacattcttcatcatctgcacctttggtgcgtgatgattgccttacacaggctccacaactggaacttgttggccactcaattgtaagactttgcccttttgttattttttatttttattttttagcatgaagagagggtgcaaagatcatagctttatgactatgtttaatagaataaatgtttgctgatttctgcatgtcaatgatgaaaattcaattattggaaaaattattgtcaaatcttgcatgcttttctaatggatcctagtatgcttcaaattcttttactacaggcatgtgcttcaaatccttattacgggggtatgatggtagcacatgtgcaccaacagttggcatgtgagactaaccagtgctcatacaatttttttttttttacatgtagtttgtcaaactcactgttttgcatttcccataaatcaatctggttagaaatgtagtttgtgcataaccctgaaggatagattcttattacatgataattttgtttcatgctatttgttttttttttttttttttcctgtttcaaacaatggtgacattgggatatcactgcaatggtataacatattatattttcactattagggatacgctccttttataggaatgcctcatgccagaatggctttgccccttgagatggctcaagagcctgtttatgtgaatgccaaacaataccaaggaattctgagacgaagacaggctcgtgctaaagcagagcttgaaaagaaattaataaaagtcagaaaggtacaaatgtgcactagcttatgcttctgtaggcatgattgttactctatagttctgtagttaattgccttaatctattttggaaagtgatatctcaacacatttcaggtttgggatatttgtcaacttattttattttacattgttctacaaccaatttcctttctgcagagctaaaactttagtttgacatgaaggagttttaactgtgtttatatctacacaggataccaaagtaagataattggaaatctagtaacctctgaaccgttgaacttttgaaaatcagtagaagattttaacaagagtgctgctttacctaaatgtgaaatgctatggatcttgaaagactcaataaattaagaagaataagatgttatcttcatttaggtttacacaaacatgtgtcaaaaatcaaaatttgtttttaatgagacaggttggcttctagtataatactgtgtacttcatattttgtacatgcaaatctgcgatccttgggcatactatactaacttctatttcttcacagccttatcttcatgaatcccggcatcagcatgctataagaagagcacgaggtaatggagggcgttttgcaaagaaaactgaagttaaggcttcaaaccacatgaacaaggaaaaggatatgggtactggccaagtcccattgtcacgttcaattagttcatctggttttggatcactgccctctgattctgccgagacctggaattcgcctagtgtgcaacaagatgcaagaggatctcaagtgcatgagagatttgaagaacacaactatgcaaatgttttgcagtcatcatctactttttgtttgcactcaggtgaaagagcggaggaaggggactgttcaggtcaacaacggggaagcatctcgtcggagcacacctcacagaggcgtcttgccattcagtaaaccattgcatggagtttgatgctgagattggtatataattagtggagtagtaggttgagtctgtaaacattggcaatttgcatgtcaagcggcaaatcattcttggctgtgtttctgctgttcatgatatggggagaagaatgattgattggaccatcatatttgtgtcgttgaaatcaaccagtccttcattatattctcttttgcattttgtacaaagatagtagtgagctaagtcaagccaacgaatcagaagacttgatgaaaagaactctttgatctactgactcactttcctatggcggctttattttatgtaactcaccggttattaatgttaaatatgagacattataagagatttgctgcatgattgtattcgcatcttcttaggcttttgacattttttttaccttgcttttgtgtgtcatcaggtcattagttcgactgaagtttgaatgtttgatctcatctagttaacgaaacttgcagtaactgttgggtaaatcaaaaacagaatgcttcacgtttcttgaaatactccaattttgtcatgctctgaatggaaatgcaaagaacatggatgttttgcagtttaacaataaattttaacaaagggaatagattgtttagtacattaaatactgtattttttacaatagggaatcccatccaaagctaagatcgagttccaccaaagttactgaagtaaaaggtcaacaacattgcagggtcacttgtgaggagcttctaattataccaagcttggcttaatctaaatattatcgataagacttaaaacaaaaaatcaattagagctgaaaatttccccacgaaatagaaaaaaagtccactttcaatttgtttgtataacatagtggaagaagaaccgaggaagtagaaatgttgagtttgagttcattcattcagtagtggataccttccgcatgttaccaaatacagaaccaccagtcctattgaaaatatgagagaatctgcatgtttaatgtccaactggattcagtgcagtctcctattccttgcatttgcaaccgttcaataaagatcgtgtcttcatctaatggttccaagttactaactgagtgaatgtgtggaaaggccattgcaacgattaaaatggaagaaaaaataaagtaggctatctgagtctaattccttggagaggtctcaaagcttctcagcctattttttcagttactattcctttaatacatccagtaagagtgaacaatccaaataaaaagccaaaaatgctgaaagtccgaagcagtacccacttactcgtccatgatacagtactggactgactcaagtatatttccaccggaaaatatatggtcaatggccaaaaaatgatgctacccagaacccccaaaatctgattgaagtagggaaatatgattgcaatcacagttgttgatgcaacataagcagttcggaaagacaggctgagaaaattaagttcaaaggctggaagcaacgggagtttcaacatatatatgtgattcacaaattcactatctgggaatctaaaacggaaccaattctcaacagtggcaaaaagtggctggctatacacctgcaccaaaacaagttagatgacacttaaatgaacatgcattctaatttctataatgtaaaatagtacagacaagtagactatatgatgatttcataacacactaccctaagacaggtgatggagaatataggaattgaagagatatcaaatgggagcaccatactaagaattattgacatggtatctctatatttatatgtacctgatatgaaccaactaggtgaaccactatacaagcattagcaaagttcacaagccaataagacttggatgatccaaaacccgttaaaaggtttcctggtgtattatcaccaaaggcagcatatccagcacctccacaactgaggtacacgaatgttgtgacggtgaccgctattactgaggcctttttcatggtttggttttctggtggaggcgatttcaaagtatccttcaaggattgcagtagattatatcagtctttataattgttaaaatccccccacccccccgagctgtggtcaagttacattctggttatctgagttcacggggtatgtacctgtatttccataagaattgttgagaacggatatgagaatgatatgtcaccaagtgcttgagaaaccagccataacttttcagctccactggaggtactaattcctccaatgctaccctcagcatgtcctttttctgagcaattttttttcataaaattatattttctacataataattagtccaatatatatttttcaagcaaacgtccatgcacaagccagtcattgtgagcctaagcaaagactcgccatacgcatacctatgatttgagcaatggaaagccccagtcctatgaaagaataagtaaaggacataattgcagcaacaaccgacagccatttgatgttatggaagttgggtatctgtgagagaacaatttggatagccccaaaaagcagcatataatatgcatctacagattcacatgctgcttcaggcccttcgttgtggtaacaaaatgaattttggattgttctgcagccacaaataaaaatagcagttcaaatttaatattggcaacatagggtgagattcttgggatagacacatgcttccttagtggagtaccagtgtaaaaatcttgttttgcacaaacggatgaaaagaagaacaaagaaaaggaaatgacagaacaggagaggaagcagtatgataagtgatgaatcaacacaccttaagctgatagctgttgtgatgacgaaggcaattgcaaaaccatacagacttatattcacaagaaggccactgagccgtccattgcttaatcctgttaccaccgaaagaggatcttatcttataaaataacattctagcctatagaaccatatcaaatgttccaaatgaggtaattggaaggagtataatcgatcgttcatctggagacactcataagattttttcaatacacaagagtcgatgttaaattgtagaagaaaagaaagggaattgtaccttgtacgtacctaaatgcaaatgaacaacatcaaggtaggaggcactcctattgggaccatattcgggatggggatggcgataagtgttgcatagaagaaaagaagagaagagagtggtggaagcaatgagaaggatgcagaatgggcctaaaagccacccaagctgtgcagtgctccatggcagagacagcactcccgatcctatcaccccagtcactatgtgtgccactgctgtccacaccgtcccttcatcacattcacaacacacaccaccatgttacttagttatactatactataatctattcacttttgcacaaaacaaaacattttagatgacaacacaacacaaacctgtccttttgagagattgggtgagtaacagtgggaggttgtcatttgactcagtctgagctgacacacccatcttcacaccaatatcagatcagatgctatgtcatctttgccacttccattcctgtgaccttaaataaaagccacacagggagaaaatgggaagacacaatttggatttttctcctgttgttgttacagccatgatgggcaaaaatgtcaaaagcccatgtgggaaaaagaaggaaggattaccaagagtgtaatgccaaaagctgctactagtcagcgaaataaaataacttccgttttttttttttcttgacaaacgcgccgactagtatcataagaatattaaaaagttaaaagaaaataaatgtttttattagaaaaaatagtattttttatgatttatacaataaatatttttttcttttagtacgttgataatgtcttaataaatcggactttatttatttatttatttagtttaattatttttttcatttattttatagaagatagtcttcgcacactcgcactctgagacagtcttaagtgtatgttgttggtttgggctgcatgcatcgttgtttgacaaattacgtaagatagtactgcacattagaccttagtacaatacacataaccccaaaaaacaatttaggatttaaagtgtgtttttaaatttattttttattttttattttttgaaaatactatttttcataattaaaaatatactaaaaatgtttgataaataaaatagaataaaacaaaaggaatataattaatttttgttttatgttttctacatattagtatatgatccataaatgacattttttattttaaaaaataaaatcaaagatcaaccataaaatatagatccgtgtggtaaacgcaacaataaaatatatttccgtgtgataaacgcaactataaaatagaacgagactaaatgattaaaacaataatatattttaagatgataaacgcaaccataaaatatcgaaaacaaccttctatagccggtccaagatatggtccataatggatcatatgtttcactggtccaccgaagttttgccctgtaaaccactctcgtatatggaaaaataaggggtgactgaaaatgagatgcacctttttgaaataactggagtgctgggaacaataaatggttgattagatttctgttaagactgcctcttaaacaaaatcaagtaagaatccatcaataacttttgtaaacaatgtttaggacaaactacctcaagtcagcaatcttacattcttagaatgtcctattctaacaacatagccaataacatgccatcaggaacagatccatttcaagtcatcaaagagcagttatcattctctttatctcagcagatctgctgggatccggttcttcaattgttctctcggtaagtacttgcttgatgcggcacattgactttctcacctgatttcacaaattaaattgacagaattactgattaatttccttatttatcacatcaaattaatatcaatttcagaatattagtttctaataaaatcgattctcccataatacattcttgaagaggaacagaaagtgtgactaagtcccaaccaaaaattagttccattaccgattcaaaggaccaaaacttgtgggaatatcttaactggagtcaaagaccctaattaggatgacaaaaaaaaaaagaatactagtttgtattctctctgcttccttccctacctaaatccctataatctcaacactatctattatagaagttaaacatgcaacattcaaattctctctaatcaaatctatacaaaacattgttcatgaaaataagataaaagcaccacttctgtgatttttctatgccaaacgtagacataactaagggtaagaaaaggccaagagcaacatttatgtaacacagaacaagggaaaagaagtgaagtaataccttggggatgcgctcaggttaggaaaacgcaggctctgtgcattaagtatctgacgttgagtcatcaacatgttcttctcctttaacaacacacaccacaacttatgaaggtcttcccaagattttagacgcaattccgatgccttccaactccgacctaacaacaaatagataaaaaagtaaacaaattcataaccagagcaaaaaaacggcacaactttcaaaggtcaatgaagaaaatcagaaatatttgtactagacaagtctgatcataatgaaaatcagagaaaaattgtcatcccaaatccaaatgaacaaaagaggtgcctagtgcataccatatacaacaggtttgtcatcgtcagggctcctgtctgcctcaaagaactctccttgctaccaacagcagctgtagtggcataaggttttgatctggcagcagcagcggcaaagagtgtttgtccaattctgctctgtattttgacatataccagtattttttgacagacaaacttagctattgaaaaaacaaaaaacaaaacaacaagagccaaaccagtatccataatatcacatagaaaccaattccattgcattaatcatcaaagttcaaaataagtcgaactaatcaatctatatattatgaagaagtaaatataaatgagaaaatgattacaataaatctctagttatatctacatagtcatctattctaatttgaaatgaagaattgatttgttgtatgcgattcaagctgtcaccgtagtatctatgcctttgtggtgcagtaagagttaggggagcttcctccttaaataagcctataagaggacacaactaaataaggttagcaaacaaattgacagaatttcaatgctaaaaattacaaaataattgaaaaacgtatacttgcacaaagtaaaaatcgtgaacctatccaatagcaatgattcaattatgtgcaatagttaagggttgactactaagtgggaaaaaaatgcaaacttggataaagtggaccaacaaaacatcttacctattaataataacacaatccatgtcaagaatagatatccaattatcaaaacttgctacttattattttaaacatacaaataggagattgcttccaccttgttttgagccaaagagttgagcatattcaatatgtcatcgctaaagttcccaaatcctatcatcacgaactagaatccaataatcctcacccttacctaacaaagctgccattgctcaataattgccataaacatcaaacaaaaattcaacattaagacaaaaattgtgtcacgtcatcttcttttatttccacgaatattaaggtaataatcaatattttcatgtttgttaagagattatgataatatattttcagatataagttattctcaagaaagttatactcataagttttaaacattttctattcctacaaggtgttagagataaatatgtatgtccaagatacaattcatcatgtcattaattttaataaaaaattgttctttatttattatatttattattttattaaattgttaatttgagaagtctttgattaaaattagaaagttgttatcatgatagagattatgataatgagaaataagtctttataattttaatctaaattattttttaatataggattattgtgaatatgatatatataatctagatagatcaatatacgtgtaatggtctttattggataaagattaatatatctcatttattaaattgcatatatagataatgtacatgtgaatgtcatcattgaactgattcaattaaaaaattttaatagttaatattaccttgatatgtcaataggaagttctcaataagaaatataataatttttttacatgagattatcatagtaattaacaagttatttatgttgttttaattttgaacacctaatgccttatgacactagttgatgaatagttgaatgaatattggatatgattaaatatttgtagaattaatgattaattaaaaaggaatccataaactttaggtaataattgagctctataatagaattaagaccttggttaggacaattggaggaaaaaagaaaagagtttcttaggtcattcgttaattagatgtgttagcttattaaagtttgacaataataatatactctaaagttaaccttagatgtaaatgatggaagtaaatattacattaattattcttctattggttcttgaaagtaaaagactttaagggtgttgatagatgtctaccttgattagtaaattaattatgattaaattactatcgatttaacattgaaacagggtcacgcacaaatgaaatgaatgtttcaatctttgtaaaagaaaataatttatttgataattaaattagagaatttaatcaaataaatattctagtgaaatattattttattatataattaatataaaaaagagtattattttataaatgtgaaagttgttcataaaataaaaataatattttattgcttattaaattagatatatgagataacttttatttttataaaaaataaagagatataatttttttttctccctttgaaaaggcccaactccataactttttaacattataaacagaagtatttactacaccagaaaaaattaaaaaagttcaagttagttttttttagtgagaaacagaaagaaaatttatttttcagagtttcactcattatagaattgaaaaaattaaaaaaattaaaatctaattttttatgtgagaagtagaaagaaagttagaaagttagaaactttattgttcgaaatttcactcatcaaaaaattgataatagatattaatttacttaattgaagaaaatttttgttatttcaaaaatgtaaataatataaataaacaaatctatttttttctatttattatgtgttatatatattttgaatacaaaataaatcctaattttactctccaaactatcaataagatgaggacatttgaatcgaaacccatttgtaataggctactaatcttttaaagttttaactgtattataaaggtaagaaacctagcctttctttgcctcctctgactgtcttctaccggccaccgcaaacaaccaccgacctccgttctactggtagagtagtggtggtcgattgacaatatatattgattcagatgtaatgtaatgtaagacgttggggtccttttgtttcatgctaaatacagaaccataatctcttgtttcttcttcttcagcttccattttggttcaacgagcaagcgcttgtcgttgtttccctaagcatggcgcataggttgctcagagatcacgaagccgacggttgggaacgctccgacttccccatcatctgcgaatcctgcctcggcgacagcccctatgttcgaatggtctgtttcggatcctcttcgtttgttaggttttttttttttctcttttgttcttgcgagattgaatgagttattattggaatattaatagttatagtgataataaaaataatgattgtttagtgaggaattaaaggttgaaggaacaactaaactgagtcagattttaatgtgtggaacctcgtcatgtgaccagctactaagaatagaagagttaatttgttcaatagctttggtttgcgctttgcagtatttttatcctgagaatgagaaatttctagatggcaactgctaagtttaaaaccttttatgttattcaggcaggccaatggttttgttttcaaatgtctgaacttggattcctggagcatcttagcttaattcttctagggcttttcaaatgaaagagcttaattatttcaatttttttcatctttgaagtatcgaacagtaagttttttttttatcacagagtagttaatgttgaaatttaaaatggtatagttgatttactggtgtactatgaaaaactatggagtcgagggagtccgtgaatgtgcttagttaataattttcagatttcagcatcttccattaaagatgagattgtgggaatccaattatttgttcaattgcttttcattatgcttatctttcggtgcagacaagagcagagtatgacaaggagtgcaagatttgtacacggccattcactgtttttagatggagacctggtcgagatgcaagatataagaaaactgagatctgtcagacatgtagtaaattgaaaaatgtctgtcaagtgtgccttctggatcttgagtatggactaccagttcaagtccgagacacagctctcagtattgattcccatgatgccattccaaagagtgatgttaatcgggagtattttgctgaagagcatgaccgtagggtatgtttttcttatgctaagtcatgtttatagtttatgatagctgaacataattaatgattggaaaactagttatgggtttaaagtcattctgtatgtagtcatgagtgaattgttatttttgtggcttgcatggtttttgtaatattttggagtttttttttttttttacatgaagaatttctcaaccctggaactctgattttcacattctaaattgacaatagctattaaaatttcaaattttctttatccatttttttaagaatctataagactactattttgactcagttctctttggtcattacttgatcgtgatctttttactaagaataaaagcatggtgcaggctagagctggtatagattatgaatcctcttatggtaaagtacgcccaaatgatactatcatgaagcttcaaagaacaacaccatactacaaaagaaaccgggcacatatttgcagtttctacattaggggtgagtgtaccagaggagctgagtgcccttatagacatgagatgccagaaactggggaattgtctcaacaaaatattaaagatcgttattatgggtatgtatggttaaaaatgacttccttatttgcttttgacttttcttactcgatctctctttcaattgctcttttttagttttttaatgtattggcatttggcactgggcagcaactcaagcattttttatctctgtgatggatatagttgttggtttattaggcactcagttcttttgtggttgttctgtgtgacgaactattgtgtagctaagataataagcttgcaggtttttttttcccagcaaagtcatgtgatagttctgcttgtaggaagctttgttttaaacaacaataatcaagccttgttccaccaagtggggtcagatatacaagtcaaaaccactatttgacattaacatttggggatccaaagtggcaaaattttattgcttactaagttttcttaattgttggtacaaaaaaaaagcagctgattcagtagcacgggctacaataagagctcggtgtcattatgttaataaaaagtggctaataactgccatttacttgcaattttggctttcttttttttccttctatatgtggctaaactgaagtcatgtattgtattgttctcagtatttagtgaagtggaatggcttatcttgcctgcattgtccttagcctgtaatttttcgtacttttaagaatgttttctttgtactttgctacttgtcgatatgtagtaagagaattttttgacatggatgaaggttgattcctttataatatgttacgtttaattttccattgtggccaaaaatgatgtagcagacagtcaacagccatcaaatatcttattgtgaggataaccttttggttctatattttagtgctatatgtgtataaagattattccttttcaatctcattaacgtatcctctacttattcttagttttctctgcatgaattccttgtgactacagatactgatgatatttctagttgcagtagttggtgtttttaattttgcttcatggttttgacttcattagtttgctgttcatgctttaaaacgttcagggtgaatgatccagtggccttgaagctacttggtaaggcgggggaaatgaacactctggaggctcctgaagatgagaacattaaaactctctatgtaggtggacttgatgctagggtcactgagcaggatttgcgggatcacttctatgcgcacggagaaatcgaatccatcaaaatggttctccaacgggcttgtgcttttgtaacatatacaaccagagaaggtgcagaaaaggcagcagaagaactctccaacaaactggtcattaagggccttaggctaaagctgatgtggggcaggcctcagacatcgaaacctgagtcagatggctctgatcaagcaaggcagcaggcttctgtggctcatagtggattgttgcctcgggcagtgatatcacagcagcagaatcaggaccaaatacaaggaatggtttactataacaatccaccaggaccaccacctcttcagcaggaaagaagctactacccatctatggatcctcaaagaatgggtgctcttgttgcatctcaagatggtcctcctggtgggccttctgggtcaggggagaacaagcctagtttggagaagcagcaaatgcaaaattatacccatccaatgatgccacctccgcctggccaatatcatcatcagtattatcctccatatggttatatgccaccagttcccccttatcaacagtacccatcttcatacaatgctgcagtggctccatcccagccaccagctgcaaatcatgcttatcagcattctatgcagccagggtcttcacagacagggtctggacaggctgcacatgccccagctgaatctggaacctcaacatcaggatcgcagcagcattaaacttgcccatatactgatgtttctagctatgtttaagtttttccttaaactaactatgctgtcatggaagatattttcactcaagttgtcaatttactatctctactagctcgatattgatttcctcgtggcttgaacaagttattttataatttgattttgtgattttgaaactcttggcttcctggttaaatcatagtcatgctcagctttagtactacttaatgaattctaatgatactacaactgaacttttgttttggatataaagcatttagtaaagatggccaattgattttataccgaccaataattcgtgaagaatgtagattgttttagaactctctattgccgagggttgtgttttttctttattttgaaaagcttccattggttctttctttcttttctctttttggttatagtacgctcgtgtataattcttgaagagtgtagattgtttcagaactctctattgccgagggttgtgttttttctttattttgaaaagcttccattggttctttctttcttttctctttttggttatagtacgctcgtgtgggcactcttttgttaatcttaatgataaagtaatatatgaatgattaagataacgagggcctttcattcctaaactgtgcatttgcatctgacattttgacattcatctttctgtatacccttattaatggatttctatagtgatttttgatgcctttcaacatgtttttttaataaaaaaaatatttattcatttcttaaccaatacattaggacactagttatttgggatgactttatattatgtcaatgtaaaacaaagttatgtgacattgcacaaattttgagctaaatctaataatccagtatcaattcaagtttatgtgtatagagttgtttgtgtagcatacactttctttaaagggagtttttcaccaaacagaactattccacgtccacaccaccaccactttgagacatccccacataattggtatcccctttattaactctcaatagtaaatagtaatagaattaatgtgaaactgaattacatggaagatatggcaacaagacaataaactcaaacaaatgaagcacccttcattatcttagtttctcacttattattccttcaagtgatccaatgagacccactaatgacaccagaaagcaaataaagctgaaggtcctaaggacaatccattttctagaccaagcttcaattttcctctgcacaaagtacatctctaccgggaaatatatagccaatggccaaaagcctaaggctcctaacactcctataacttgattgaagtaaggaaataggatagcaagtccagtcgtggaaaccacataggctgttctaaaacatatcctgaaaatgtttagctgaaaagctggcaaccgaggcagtttcaattggtagaaattattcacaaatccactgttggggtatctttttgaacaccatctgtcaacagcaccatatatcggctgactgtaaatctgatcaaaagatcataaacaagaatcacaactatgatttgtctggtaacatgaaaagaattcagatattgttgcatatggacaagaattcatatagcttaatatttattattttattttttctaataaatgtcattggagcatttcataagctaagttaggaagctaactatttccagccaaacctttcctaataatgtattaatttagaacttctcttgtattagttgttttaatttcttccttatggtaactttacctgttacaattgtgctttcggtatgaataccatcatttctattaattttacattaagaaagaatgtagtagttcaattgattaataagaagttacagtcttaagtataaaatgtgaactttgatcagtagcactagtacctgatatcctccaaccaagtgaagaacaatgcaagcattcgcaaagtcaatgagccagtaaggctcgtaaaatccaaaccctgtcaagaggttccctggtgtttgatttccaaaagctgcatatccaaagcatccgcaacagaggtagaagaatgttgtaatgaggatagcaatcatggaggcctttttcatggtcttgttttctggtggaggagactctagagtgtccttcagtataaaaaaaaaaaaaaatcaatacttagcttcagctgtaaattgtgtcttcttttagagtttaatttctataaactgataatgaaaaaaaaaaaatgcaccgtcaactgataaaaaatcatgttaaatacaatttttaaaatagctattataacgtaaacaaacttactataaataacaatttgttattgaatcacaatataaaatatctttacagtttacttgtgagtgcatttaaattaaattctcctttacacgttcctctcccacccaattggaatatgaagggtacctgtatctcaaggaggatgactgtgtatggataggcaaaggcaatatcaccaattgcttggaagactaaccataacttgtcagcaatatttgaagccggtactcctgttaaactacccataattcttccattttctgcaaaagcaaccaaaagtctcatgatccattgttctctttccactccttgattctaagaaaatatcataatatagtttttttcttcatacataaattccacattccatatattttggcatttaatatgtttttagcagctacatttgtgttttagaataatagtacttgtttttttttccttcatcttgtttcttcaatgatcagaaggcttgaacggacaagtaaacaaaacattaaattctaattgtgaaaatgaaccttacctatgactgttgtgattccaagtccaagcccaatagatgagtatgtaaaggacattatagccgcaacaattgaaacccatgccatgttgtggagatctggtatgaatgacattatgacctgaactagtccaaacagcatcatatatactgcatccccatatttgcaaggagcctgatgcccttccttgtgataacaatttgatttcaatatcgctctgcattttgtagaaagaccaagcatcgttagaacatgaacacaaatatcattaaggtagactagtacctctaatattacatgagataaaaaaaaagcaacagatgatacaagtaacaaactactacacaaattcaaaattgcatatatacaatgatcttttcattttacatgggatttaacgggaattgtacctcaaacaggttgctgtggtaattacataagcagtactaaccccatacaagctcaaatattgaagggaaccagccaaccatgtccttttattgcctaaactaacagaaaacataattagttggcataaaatatggtagcatttcactggaaccatatcctgaatttgagactagagtgcttgtacaagaacaaggaactaccaagatagactctaacagcatccatgtaagagtagtttcttttcccagttacaggatccagagttctgtaacaatcggaaaggaggaatgaagaaacataggtgacaattgcacaaaaaagcaagcaaactggtcctgcaatccatcccaattgggaagtactccaagctaaagacagaacaccagcaccaataatggctgtgatgatatgagccacagcactccataaagttcctggtaaaattgatggaaggactaaaattcaggagtcaaattcatatatatgaatatggaatggtcctagagatttttaccggtccttttagcacgtccatcatcgtcataaccaccactaccacttctagttatttggagagatttttgaacagccatttttatccaagcatccaactcaattggtattcatggagttcagtgtaattgaattccgtatacagtctacagccaactacaatcaaaggaactatatggcagctacttgaattcaaaattatgtttgtttggtaactacataattttggtctgcatgtcacatgcttatgaaattaaaaaaggagatgacattttatatgaattttcaaaattgataaaggactcttctttgatgtctaggacaactctcctaaaattaagtaattgacgagcagcatagaagaagttgcaggaaatagtgtaaataaatctaaactatgctgataaacatgtgtgtctgtgccaaaccaaaattaaaatagctagtatcttaaaacttttggaagccatgttcttgataactaaggtatgtactaaaacagacattactagcgacaggacacagcataaaatcaggaaaactttattgtactagatttcattataaaaaatacaggccagaacatgatgtgtagaggaaagagattctttgaagtttgaagctgtatggtgtatgactgtggtagccttttaataaagatatgtactcgtcatcataactttctaataatggagctgtcgtgttcttgtggaatatattctctcaatgctcaacattgtgaaaatgattcagtaatcagtatctatcagatgaccagaggtacgtgagtgaaatagtggggttaatgtaggaagattcagaatatttgaaaatgtacaaaatagataatttagaaaacttacatattatgtttaacatcatgttgggtattgctcaccttagtcaacacaccaaatactccaacatcatctctttctggtagtttgtgtacaaactttatatacatcacaatacttcataccccaacctactacatattattagattgtttaagaccaccacatattcatagtctcctctaatttttaaacgtcacgtattcaaaattttcaatttatgaaaaataattaataatatttttttacatacatgtcacgtggagattaattaatgaaatgataatagtttttatccacctaataatttctcacacccacccccctcaaaaagagagagataagagtttgtcaattttcgcttttttcactatgcctctcccgtacgagaaggactctattatttgacagtcttcaacaaactaagtgaatgaatatttgaaattatattggttttgtccttgaagttgaaagcacgccaaacgtggaagaccagagtgttttatgctcctattttcaacacttgcttatcatacctatagcccattacgtgtagcttctttctatccaaggagcgtatggaaaatattggatttcatgaagaatatgtaggactagaataggttgcgtaaaatgaatgtatactggcaacatggttcaacccttccttatcacacctaagggctaaggcccactaccgtttagcttctttcacttcaagctcaaggaacgaagagaaaatttgtgattccattgaaaaatatgtagaatcattttgcgtaaaagcaccatctttattcagttgagtaatgtcttttgctactttaattgattggaatatcatttggctcatccttatcgtaagcaaggattgtgctaattttatgggactttgtgaacttcccatatgcaaagataaagtatatatagtcttttttgtgcagcacccacaaaggttacaccttattgacgcccgcacacagaacataaatgaagtccagccaaaattgccacagcaaaaaaccaatgtcatacatttttacccagctaataaattatgcccttcaccaattgccaataaatgctgcacttccaccagcacttattgcaccccaccactggattagcaatgtgctaaaggaaagtagatatgaattcctgttaaaataactggttaggttaaatgcttggaaatctctaggtaaatatattttgcggttgcctctcagactcagatggaccacctattaatcatcaaataaaggaaagtatatacgtattttatgccaaaatgtctacctcgctgaaccagaatttctcataaactgtagcctatgtagcaggttggacctgtgtcttttaactcaataggaataacgtctgttcaaaataacatatatactctccttcaaaaaaataacgtctgttgaagcccctagtttcaaaagttgcaatttggttctgatactctgttgatttagtagtagaagtgccatctggtgggaaaatgcaaggatgtcatattaagggcatgtatgttttcactttttgattttaaaaatgttttgcaaaacaagttcacagttaaaaagtttttttcaaaacaatttcacattattcatatattaaattttcatttaaaatctattacattttaaaaattgttttaaaatacttaataaaacttttagttaccaaaagttattggtccaagtaattttagactcggtttctttaagtaaaatttcggatgcggaccttgtggataaaaaataattacggtacttcgtaagattcaatttgcataattgaaatttgattgatcaaaaatataattaattctaatcttcgatttttatcttgtttaatttttcctcatttactcattgtgtcttccagacttccactatcctctactctaccaactttttttaaattattttttgaaaaccaaaaatatattttagaaattagaaatcaaacactccccaaattcaacccctagtatgcgtgttgcgttcaattgtacaaaaaaagattatagaatgaattaagtttttttttttttttaatcttttggttctggtgttgtcagtggttattacttactacaataaggcccagtttagttataagagaataacaagagatttgaattttctacctcccatcttgaatcatgtatctcccaaatttttaaaaatcacaaactacccttttcatattaaacctttttagaataggtattttataacaataaaaaatagttatggcttctagaataggtatttcataatcgtaaaaaataatttttaaaatagatgtttcataacaataaaaaataatgttacataatagtcaaaaataatggttgaaaataaaaaatattttatatattttgaaaaccctattctagaactcaatctgtgtttcagaattatcattccgactattatataactttcgaaattgtgtctttggaataatagttgaaaataaaaaatattttaaaatggtcgttccagaagacaaaacaccatgtttcggattacattcttacctttaatgatgatgtgcaatggaaggagggaggggaaggacgttgtgcgacattgtgacttgtgaggaggagatcacaaagctgccgtgaagaaggtgaaattgtgggagaagaagttgtcatcacgggagtaattcacacagagagggaagtgttagggttggagaagggtaatttgatattttcaaacaaaaataggaggatgtaagatacactactggaagtgcatgattcaaattccgaacaacagtctgcatgtaaacttcaaattgggctaggccgagcaagtattatggctagcccagcccgttaacggtaacttagcaaaagcaaacgtacagttagagccatgtccgaagattttcgaaaaacaaatataagaattgacccaaaaaatattttgactgaaaaaataaaagaaaaaggaaaacaagcacaagaggatttaccaagtgtgtgctctgtttaatgttgagtaatgtaaaatcactttaaatattagttaacgtgattataggcaaattttctaatgttcagtccggtgttgaagaattgattataagtttataatttactgagttaaaacaatttagatagttttgcgttagataaagaaaaatactgaattttagtactaatttgcttttagagtaaagatttttaaacataaagaaataactttacttcacaatcaattacaatcaaaaccaattttaaaatcatttttattcaaattaaatcaattttataaatgcttaccatttcttattttcacgtttcaacgttgatttgattaacagatacattttttctattatttctcaacttttctatttgaaaaagaaactctaccaaattaatgcaccaggttatatttcccccataatttccttatctatattaatcttcatttataaataaataaatacaaataaaaaatgactaaataaatgtctactatatgcatctaaactctaaagtttatatcacataataaattttattttttaatgttgcaggcattttgtcaaactttgacattattttagctatatgaagttgataaactctggtgttttatggtaattcaagagaaatcaaaggtatccaaacccaaatatgtatattacactcatcctaactcaccattagatataagtagaacagaaaataaagctatgccaaattaaaaacacatgcatggggttacctgatgcagtgatgcaccatataagcccgcatgcaccagcactccacacaccttttgcctcgtgtctcctaatttatcatatcataatatttcctattaatcataaaagtggaaataagcatggcatatataatagtgtttgatcactaacctaggtagaccttaacagcatcgatgtaggaggggcacctaatgttgccatattgaggatgagggaatctgtagcagtcagaaagaaggtttgctgaaagaaaggttgttcctgcaaagaaccctaactgtgccacagaccatgctagagacagcacccctgcccctatcacaccacttattatatgtaccactgccctctctacattacctaattcatgtcacatgtataaagaataatatatagttagaattttaattacctttctttcttttgaatatttgaatggtaagcatgatatatatatatatatatatatatatatatatataattaatgtcaattactatattcatctttaactttcatcacttggacataaaatttatgattaaaaaaatgtaacatggtaattaagaatattgatataaactccttcattaaaagtttgagaagtttttttttatcagttttattaaatatttttaattagttatacattttttaaataatacttgttacttaaatttctcaacaaacaccacactcattagaaaagacaaaggtgctaccaactgccattcacacaccagtcagtccaacaaatatctcactactgctattcaaattcaataccatctggctgcagagaaaattaatggcagaaattccaaggaggaagaagaaaagtaattccttttacatatacaaaagcattctgatgggagaaataaataaagctttcatattataaatgattaaaaacagatgtaataaccacttaccagttctcctaaatggcacgtcaagggaaggaaaagcttgaatcaatggagaatcatctgtttcttcctcactcatttttgtatcccttcaagcttgatcgatttgcttctcaaaaatcacacactcagggcccaagaattataatgaaaataattaaaagggtgtatgagtaagcatttttcgaaggcataacatatttatatatagacgcaagcaagcctctcaaataaacttcattcgaagatccacgagacacctaacccatgtttctgacctttctagtattcatgaatcttttttcatttttttctttcgatagcttgaaccttttttcatacaaccacgtaataagataatatgaatttagcgttgatctgttatagaaagtggaaacagcctttttacgcgaaaaatcataaaccacctacgtcgtagtgcccttttattccacgatataactcactaatactcgcaaaataaaataaaatattaaatttagttctagattattactgatgtattaaaaaaactatttatattttaaaaattaaataactgtgtccttatttacatgtaatagatgattgacttaactataaatataaaagtataaccaacttatttttctttagaagtatataaattacatgaaatcaatttatctgtgattaaaatttaaattaagatttaaaagcaatatacgtaaataaattttattaactcttttttgttcgccacatgtatccttcttcacattaatcttgtttgagatactctcaaatactgaatatatgagcagtagagatagtctcttttcctaaactcaactatgctagtaattttattaattgataacacaatttcattaaaaacaacattgaaagaaaaatgtatgtatattatgctatataataatatataatagtaaaactgttaaaggcttagacgaaagttcttaaatgttctttgtgattttaatgttgctttatggtatggtattttaaggccaatttagatcccagtagcataaagttgtgctgaataagatgttggatttgtgataaaaaaaataaattgcttccaatgcttttttaagatttctatatagtgataatggtgtaaagatattgtggtattgaactatgttgcgagcttgaatttggttagttataattctgaataaaccaactcaagtgtttagcgcttcattttcaaaatattcatttgaggtagcctccaccctggaaaaaccttggatatcatattattctttggtttaaggtttctagacagacaataatttaacggatcagttaaattacaaaaattttattctcttcctccaatcacaggttatactttttaatattatgtatctgttaattacataatcaacagatcggttgcatcatcatgaattttcatgcttcaaatgtacaaaacaaatacagaagattccaacagtggaaaattggacaaggagctcaacacaatttagcatggaaaaaatagtagtcacagattttatcaacttaaaaagcctaatccttgatgcaatataataccgggaaaccattagtgtgctttgacaacttgaggcagagatttgagaaggggcaaagagggtcttcgaactgtgtgattaagaagtaacataaatgtcagaagtgtcaaggctccagcctgatgtgcagtgcccagtgaaacaggtacatatgaaagaagcgttgaaattcctaaggtgacctgaaaccatgcaaaattaattacattatatactggatgacaacagcctctgggaaatcatatactagactactaacaaaaacaaacaccataaagtctttcttcctatttctattttatctatttatcatcatcatcttcatttagttaaagaatcagacaaaaacacgtggaataacaggtctgagtattcagttcgacaaaggaggcaatatatcgacaggcagagagctagctagaaacaacaatacaaaatgataattattataaagtatataaaactggaaattgaaattaagacctgaagagctgccatgccaacagcacctccaatcacagatcgtactgcaggatgtatctccagctttcttgttgaccaccataaaatggccacagaaatcagagttgcagttgcaagtatacggtgatcaagctgtcaagagcaatgcgaaacaccaattagaacttcatgttgttaaaactttggccgccaaaccacacttttgaggataaatttactactaaccaatccaacaataatggctcacaaagtgtttcaaaacatttcattcagttcaaatttctcaattcttgaaaagataataaaaatccatccaaaaaaaaatcaagaaaacaaaggtattattactatttaagcttttcagagatatcagcatggattacctgtacagttgatgtattctcaaagaaatttcgaatcagaggcttcatttcaaaaatgtcttccggtatccatgtatcacccatctttgggaaagtattaaaagcatgcccctgggaattaacatgtgagcagaatgattatctttatcctcaccaaaggctcaattatcatttcaagtataaatgtgaaaggcaagaaactattgaataagagaacatacagcatcatttccagcaacaaatgcacctgagacagcagtaagaccaacaagtacgctgataggcaatgcaagtctcctcactttagctgccccacgaacccatgttagcgattcagctggtggttcaggcataacaacagaaagtgcagtccagaagaggccacagtaaatagcaaatgctgatgtaagatgagctgcaagacgataagggcttacccttggctgagaatattcagatggtggctcctaaagaaataaaatgttattagaatctgacagggccggtcaatttaacttcaaataaagagaggaatttatattatttatgttccaacctctaaaccacttttgaccatccaccaaccaatgagaccctgtccagcacccagggcaaacagaacagagagtctcagtcctaatctcaacgtaatataccgcttatgaagaaaatatgaatatggcaaagcaaacataactcctagtgcccttccccacatacgatgtgcatattccatccaatagatgaatttgaattcttcaatcttcatgcctctgttaacactgccacaagcgcaaaactaattatcatcatgacattcataagaactactaagctctttgagaccaagtgtcaactcacttccacttaactaatcccttcccttgtttttcttgcaataaaaacacaatcagcactaaaaattgacctattcattcaattattctccatcactgtcatattaattatcatccccatactctgaaacacacaatcatgtcaatttttcttgcagcaaaaaagtttaaactattatttaaccgtgtaaattttatgacaaagtttgagaacagttatttaaaacattattcctaaatttttaatcatctgcttattatgatttgatttcaatcattaacaattagtcagccaacttcaagaagacttatttacatatgttaaggaatgagtatcttttctcgcagaaaaataaaaataaaaagtcccttggtgcatttcctaagttaatgggaaattaaaaaggtgtagcaagtgttttcagtttaccgcttgtactcaggtgactgcttatatttatcaaactcttgcaaccattcgtcatctgagaaaggagggagagtgccggtgaatttccaatcggtcattgaaagaccagatcgagtgagtctggttaaacccccaagcaccaccatgctgaacacccatgccgctgacccaaagagccatactccaaccaatttctgagcacgcgaacccccactcactagcagcttcaatccttctttttgttcagcagacaccatcttagaaaagttcctcatttgtggcacatgaacatgatgaccctaaataaaaagcatcatcccaacacaatttcctcagaactaactagatgtagtagtaactagtaactaatcattcacacataatagcatcatcatggaggaattaaaaaggaagaatagtgggtatttctgagaatgagatagagattaaagaattaggagtgattgtgaatataaaaagtaaaggaacagatgatgacccataagatcatacaagtttaaaagggataaaaattgaaaattgaagagtacccagatgagaaagtgaggtaaccttggggattagttgggatcggaaagcatgaatgtaatgggtggcgacgggaggggttaagaacttgaaaggtggtggttgggttgaagaagaagagaaaggcgttcctctaaggcttagcttgtgaattccgcatgcttctttgccgcgcttcaacactgaccacaccgttcccctaccaaacatctctgtttctctcctgcaaattgcaatgcaactttcagttcagggtttaaccaaggttttgttttgccaaacccaaactcaactactaaaacgcttattcccaccaccgacgtgtcgttttgtaggcctaaccattgtattgaaactccaatgttatagccttctatcctcaaatattattcatataatttttacacctttttctttcattgttgtacaaatttatttaaatataatttctcaaacaataattaaaaattaatcgggcaaattcatccttgaagacacaacttggtaagacgctcagaaattaatatttgaaagataaatttattatgcagattgacaaattgatctttaaactttacaacttaaattggttgtcaaaaaatataatattgtcaaattgatcatcgacaaatataatattgtcaaattcttaaacattagaacttaacgataaaatgatcttataaatttaagtaattaaatacgagattagtttgtcacactttttacatattcaaagactaaatttatattttttatttttgaagaactaatttgttcaaaaccaatttaactatttacccataattatataaataaaacacaagctggctgtggcctgtgggctggcctgttgccttattttcacttttttcttaaaaaatattacagtgttcttggttttagaactttgttcaggaagcgcttgattggtatttgattttcagcacttgatatcataatagcagcaccgatttcaatttagtaccataaatttatcagagtttatcgcagacttcttaaaaaattatccaatttatattctgaaggagcttattaatgaattttttggattagattttggagaatttgcatcaattttttttggtgtaaaggattagcaaaaagcccaacaacaaggaaacgcctaggctattgctagtaagctcggcattagtgcacttcaaaatgtttaaaatgtgattgatgacatttctagtgaatcactttggtattgtgtagtagggattgattgagcatttttagtttaatatttttctattcttcttagtttatttgacttctcttaaatttttattttctcattttaattcaatttttgtcttagacaaacaaaaggatttaattgctaattattatttattttcggattttatgctcacttgatctattttttttgtgcaggacctagaaagttctacagaacttcaaatgacacgtatgagtagtccctataaacaagggcggatctacgtataagagaaggggggcaagtgcccccccttaaattttgacataaaattaccataatactcctgtttttaaaaaaattcataaaaatatctaagaccaagaccacgagagagaccacgcgcgctcagtgactcagtccttttgcaagttctgctctgctctgtgctctccacgcgttctgctcctcctccgccactggcaggaccgccaccgtccaacgtcggccaccgccgaactccagagcctcctcgcgcaacatcggcacgggcgcacggcaacacctccgactctccgaggcttcgactccgagctgcatttcgcgcttccgtttctgggcttctgggctctggctgggttcttcaatcttcactgtcgggatcttattctaaggtctcgataatgccggaaagaccaccttacttcacatgctcaaagacgaggtttccctttccgatcccttttccgcttaagccctgaatcgctttaaatttactgggaatgttattcttttagttagaatccttttgtacaatttaaatattattacgaaattgagtgtttcaaagaagggttgcatggctaattgtctctaaatatatcctgtgcatgtttttaaatcccggttgtgttgtgattagcaatattatggaaaattgtggctgtggaccacaatttaaagtcaatcctgtgtatttgctgatgcagttgaggaagcctaaaaaactgcaatattgtgctcaaggttttaaaaaaatatgtgcaaccgcaatttcagcctcagtgtcaaggtttttggggtcattgtgattaatttttaaccatctgaatattgcatttgtatgcaatttttcataatatcaaggattacaaccatgaccacaatctaaaacctttattgcgttgcaattgtagttgtggtttgcaatttaaaatcaattatatgtattgacatgttttggtcttatgctttttttgtgtcatctaacaccaatttttttctttaaatgtgtttttctcaacaattattttctggttttagcaagcttaacaaattgatttcagatatgtactttgtaatctctaccttcgtgacattatcatagtttattggggctagaatatgcgcctggttattggtatttttttaaaatgagaattggcttggcagagactagttcaacatcagcctacacagtatccaacatcagaggagttgagtattgggaggatcaagtttaaagcttctgatcttgagggtcaccaaattgcacgaagagtctggaaatattactatgctaagttctccctctcctaacacagacacacatttgtgcatatatttatgaagtgcaccctaacagttgacttctcaactctgttttgcacctttgaaagcatcacttgatggaacttggctatatacctataagatttgtttggaatttaggattaaatcttactcctcaatctgatacagttttagacttttggtctacatgctaatattaatgtgtggtttgacttggaatatgtgaattttccgttctagctgttaacaaggataaagtttggtgtgtgcatcatggcttttaagaaattacatgaatatttggaatgatttggaacttgaaatgtgactatttttttctttttattttttgaattgttgatgcaatgatgctgatctaccacctgcagactgcagttttgctgcctttgttgttcggattttcagccacgaccacgaccacttcctattcgtacggtaagaacgcttttttatttattttccgttataatcttccaaatattgagtgccctccctcattaattttctggatccgccactgcctgtaaagataagaaaaagatctacaattttgtcagagataagctaaggtcaattctgtcattttgagggtcatttgaggcttgaaagtcagaagctctgcacttgaattttggactgcgagttacatttttaatggtgtaattagcataattctagtgaaacactttggcattgtgtagtagggatctcatatcacaaaagaaaaaaatgaactcatttggtggtctatttggtggtgctcaaaaggccaaaaacatgcctttgccttgcatttgctctcttaatcttggtactggacttctgttttctttcacaggtgcaagaatggagacaaaaagctctttcatctttttctgcagtctatcaagctatatcagaaaaaaaaaaaaaaaaaaaaggtgcaaggattgttctacttataatgaatttagtttggagataaactggtttgctaagcatagttaaggcctattttattagtaattttgattctttaatttatatacttttaccctagactcatgccaccattatgtgaagctggaattccaagggtgtgctatcattgaatctttagtatcaatacttgcttgcatataaatcaggcttacatagaggaaatatttggtgctttgtttaacatttgtctcctgctgcagagtccttaggtttgttcagaagtacttgttaaattgagaggattcattcagagttctagaccaacccaacaaggacctgctgtcaatgtagatttctcagtaactgctttcaatgagagcatatcagcataggagttccatacttgcagaaacgccttgagtaatatttgcagtggagcataaaaaaattgaagacatgtaatctttgaatttatcaaatcaattaattctccatttaaaggatacgcgggctaatcataatgcatttctatccgtatatttcttttctagcttaacgaaactacaatgaacttcttagaaatgaggcaaaatgaaactaaagagcaaccaattcatactgtatgggccaattcatactgtatggcaaacgatgcaaaggctgcatttacattctgctcaagtatatcacaaaaaataggtagagaacttcgtgatattcattcattgcttctggttattccttacagggaacctaacatttcctgctattgctctacatacactcatcatattgttgcgaactatggatacactatcaagtctataactctaaaccccttcatctagagacaaagtctctgattcaaaaatcaatagaaatgctccattggtataactctttctcaggtactctcaaatcaatagtcaccaatccagattcttcctcatacttgaattctacttcttctgaatcaactattatcaacttaggctgagctgatgaataagcaccaaattggccacaaccacggactttcatggctatatttgtactttcattagatccccaactaaactcttggacagcccctcctgaattgaacatatttattaaaccaataggagcaaatttgacaccattgctcaattccttcacgggaactattgtgaaaacttcatattctctggttttcaaggtaactgggatggatgcatcctttggaaggtaaaccacttctcctgcaaattgacatcataaaaagaccattacacaaaagaaaatttgggttaaattttgtaatctttacaagtatcattgtcaagccgaaaaacataccaccaagatgggaataaataatggcatctcctgtccatttatcatctgctaccctggataaatagtcaacatctttagccctaatgacacctgtgacaatgcctggattctcatcgtggataaggttcttcttgccaactttgcaccacccagctccttggcaattgaataccgcaacaactccagaaaaatcattcatgttccaaatcttcagaagactgcaaaagcagcatacaaggagttaagtaaaatacaaatataaagaagcatgcatactatattttgtagtagagtgtaaagagtaagatactacatcaattggtcaagtatataactatataggtagccaaatcattttggattctttacctctttccatctctggcaggatcagtaaataagcaatcctttgttggtcgtcctggaagtttagcccttaatatagaaccatcaggtagtgcaagcttcttcaaaagaccaaagtcatggtgtccgggcttgtcactgcacaatagaacaacatccaaaggtaagacatcatttatcaaataaaaaagtactgaaaaaaaaaattactacaagctctactcacctgacataaattggacatccccctacagctcgtgctgcaccatgatattcagccattggatgtaggctctgcatattgcacaagaagttaattagctcctgcagaagcaagttcatattttttttcatgaaaaaagaaggaaggatcctgtatttggtaacttacctgaaacatatcccagtctggctgcataaattcaccaaggaaaatagtattgtaagccactgatgcaatgtgaatcgtgtgggatgcagggtctcttggccagaaatcatctgatgccctaataacagctgaacgctttgcgctacacaagtaaatttataaagaaaatcatcatcatgaataaaaaaaatctattgttattgtgttaataaaagcattcactgaagttttataagcaatccatacctgtataatccatctgtgttgtgactcatgcaacaaatgattccattgtcagggaagttcctagcgattgatgcctccaatgcctggtggtatttccttgcaagtttcaccctcccaccatgtcctgctccaagagtttcaaggatattctgaacatcaactttgacaccatcaataccagcagatgccaaatatgagtggagttcatcgtaaaaatgaaaaactttctcaggattcacaaggccgagcccattgatggcaattgttgtcaaagcttcatctggttgatttgactcaactccaggagatgagatagggaaggccatctttgattcgtagtgctccatgcccggaaccccgggtttaacacctccccaatatcctgttattgcatgccacacatatacatgcctgggaaagattttccaaagatgatcatgagtactatgtgtgaactgaatatcttatggagaaatagaaacaataaaatgaaaatggcaatactttatattatgctctagtttgatttcattggtcatatgacgaagtcccaaagccgggtcctctactcgctgaccttccttgccatctttctggaatttgtgattctctttgatgtttgttaagcgatttgcaaagctattggacaagaaagcacaaaaatgaactgattcaacaatgtaaaatggatggaattacaatttgataatgaaacttagaaaggaagtacccacttggctgaactatcagatttccattcaacaccattggggtccatcccaacagattgccatccatcatcaattataacaaacttagcaggaattccacctttctcaaagctgcaaaaataaaaataaaaatgtaacagtcacaaatttatgtgatgcggcatatctcataactatgtccattgtccatggaaggaagtaccacctctgcaatccttgcttcacattctctgaagtgacattagtgtagaaagcatcccatgtacaccatccaaaccagttcaacatatctggcatctgaatataagtgggggggaaagtaaaattagaggtagtgaactttaagatgcagtgctcagaaataagactgtctatggaatttccattttagggagggagaagctatgtaccttctttcgctcgcgatgtgcaaaggtctgtaagtgtttctcaacagtcctaaaaaaaattgcaaaaaattaaaataaaatcaataacttgacttgtttagacatataaaacactgcacatccaaacgtgcagttatgttaaaacaaaaatattacttcagaagattaaactcaatttttgtaataactaaaagtcaatgatcccaacccgaaagccttacttatagatttcgatgactggtataaactaaaaattagggaacaacatagatgaaatttattgaaaggtggtaactcacttgacagaatttgttatgacttcaaaagggtcggatccaaccccaatataaaccaaatgagtcccatcaaattcttccacagcaggacaacctgaaatcagatacaaatttcatcactttgcacaacagcaaaaaaatccccacatatatgcgaataaactaatgaattttttcttcttctgaagatcacataccactttccacacagatttcaatctcgtcttgatcattcccctgaagaactgctctgaaatctccttccagaaggggtaagaaaactgcataggtagcagcaccttggtctcctcctccttcaatatcagagccactgtgtgcttcaacaagcaagaactgcgtctcaatggggatttcttgtccgcaagtgcccattctctgcgtcatccaccacatcttgaaccggaaaacacacataaatcgcaaccccctgaaaaaaaaaaaacatcatcctaggatcagaattgcagtatcctaaaataaatattattaactatgcaccaacacacactataagaaacatcaaaagcaatccagtacatgcacatgcacttcctgattgtgacaagcaacaacaaaaaatacagcattcacccaaaattacaaagattttatttttcaccaacaagaagaagaagaaaagaattgaaaagagaaaagtgaagagtacatactgaagcttgccaattgggaagactgtgcggctacccttgtgatgggattgaaccccgatgaatgccccattgagcaaagcaccaccacatgcaggggaaacaagaaccttgtcatggacatggctcagcactttgttccccaacaccatcaagttcccatctgcaacagatattcctgcccctacagtcatctttgatgatttgatgaatcaaacacaagctcaaaaggaaattgcagcacacagagcactgcaaccgctctactgttgtttgttccaaatcaaatccaaatgagtcaatgcagcatgggaaggagagggaagggtatttatagcaacaggataatgataatatcacgtaaagctgtgtcagcagggtgcccaatttgttaggaactattgccattattgatccataatttatgaattatcaacaccatgcaatcaatctagccactcccagactaaagtctctctcttttaagaaaatttgctgctacaaatattcatgtggacatatcttatatttatcatttatttacaacatactttgtatttatttatttttgtcttttgtggttaaaacttaaaagatcggctaatcagaaaggtaagacattcaaaaacttaaggacattgcaataacacatctttcaagtttcaatgacaatcttttttcattatttaaatagtgcaccgattaatcttttgttattacattacacgtctcttatttattatagattcgtattgcaaattgcactattatacaattcgtaaaatatagtaattgacataaattatctctccaattattgattaagaggcatagatattttgtttttaaaatcgtacttctttatgtataaataatacagtgctatctttttttaatgaataaactaaaataaataagtaaacataaacaataaataaacttacggtaattattctccgaaaaggaaaagaaaataaactttatcagcacacgtgaaagcacaggaaattgtgtgtgggggccacaataatgatacttgagatttgagagtcgttgattcgcagagtggatatgataaggccattgaggtgtaggtggagtgacgcaagggcgaagcagcatatcacaatcagtggaagaaaaatctatgcgtcgtgagtggtgaaatgacctacgtggcatatagaagatggggtccacgtgacgcctatttcaagaaaaatcgtttttgatcagacaaaaaaatccggtaatcgggtgaaaggcgatgaatgatctacaacgaaggcacacgtgaaccctatggagtggcgtcagtttctctgatattttatagtgcaatttgacttgaggctctgctgtgcatgcatttcacttcaattcattcaatgtctttgcatcctacattgattttttttatgcaacatgttagattcattaaacaaataaaaataagaataaatggattatgaatttacattgtaaagtagtagattttagtttatattatttaatcacaaattatatataataaatttactaattttataatattatttttaaaagtcatgaataataatttctaattaataatataaaaactattttatattttatattgtgaatacatgactaaattctaaaataattgagcaatgaaaatacaggaatggttcatgtttacaaaaacgagtagtatgacatcactcagaacaatatgcatgccagtgacgtggatgataagattacaactcgttcacagctcagatctgacttggcatttgtttcctaaaatttaattgcatagattaaaagactaggcactaacaagtgtaaaaaaattagaaaaaaagactatcatctaataaaaaattataacgtgggataaatttcttaatttttataatatttgttttacaaattatattaataatgattttataaatttattattaaaataatagaaaattattttatattatctatagttaatcattaaactttattttttattttaaaaaaaataaagaattagatatttttcccattatattttttaatgaaatttcatatcttccctttacttttttctctctcttaaactaacagaatatagataaataataaacattaagaagttatcaccaaataccaaattagttggatttattatctaaacattcaaataatgagcgatcaccccaataaaaaacttcaaatacaaaggacttgaacaattaaattttttaaattatctcttagtattctttattaaataaaaatattaaacattttttaatatttttttataatattgaaattaaaaatatataaaaggatacaatattgtaaaaattgtaattgtaatagtaaatttagttattttgaagcttactccattaaacccgaacattgcgacgctttcacattattagccgtaatattgttcacctgaactaaaattatttcatttcagccatttatttataacatgagttaatcaaccactgaacaaaagttgattgagtaaaaagtaaaaacttaaatggaaaatattcggctatgaaattataagtttagttttttataattttaattttatgattttgatttctttatttataaatcaaagtaacttaattttatgtgttttcataaaagataataaattactgagataaatattttatttagttaattttataaatattttatatgagttactactaaagagttattttttttttccaacaagtcattggctcatttcttttagacaacttctcgagtttaagttttctggatgaaaaaaatgtagttgagaaaggagacttcaataaaggtgatcagttaggtttctcaatcgagatttgccattaataaaattagtagatacttcacacaaatatcatagtaattaaaaaaattattattttttagaactataaaaatttataaattaaaaaaaattaatatataaatatttttaagtttatttaatacaattttatttttattttatcaatttcacaaattaatatatatgttattttcaaaaaatattttgtaaatatatttttatgtaaaaattatttttaatatagttatataaatcaatataattgcatcagttaatatttaaattatataagttaactaaatttattttaataagtaaatctttttatttaaattatgcaaatttatttttatatataaataatacaaatatcttaattataaaaattaataaatttttaatttttttagattatttgaatattattttaaatttatgtaatttgtataaattatataaaataatttttaaaatgatatatatattaattatgtaattttaaaaaatattataattaaacaagaataattttttatatataataatttattaatttatattaaaataaaatcttatgagaaaaataaatacataaaattaaatgttaaatactttattttaatatacaatttttatgattttaaaaaattaatagctcttgactaattatatatgtaaaagaatatttatataactgactaaacaaagtaagtgtcttaataatttatttttttggtttttatataaaagattatgtgttcaatttctacttttattttttactttatttaatcctttgtcacataagcgttgagttaacggtctaaataagatgattaaatgtatttagagactgaattcacgaatgcaaattatagaaaacaaaaataacaatttaaccttaacttatcaaatatttatttgtacttaatgcttcttttctaagttaaactactttttaagttttctaagtcaaataattaatctttgttaaaaaaatgagagaattctgagtcaaatttcattttccctttcctttccttttcaagcgttgaacgacaaatttgataaattctcaatatttgatcatcgctcacatgagcaaaaaaagtagaattaatcgcattacaaatactcacctcttgcacttatttaatcatacttccaaactctacacagcacacgctcacatatacattgtctctaatttccttgatacaatttttttcccttttctccttttatttttgttcatgttccaactttttgtcatggagttcatatatcatgatttccaaaaccaaagaactccatctccaatatcacaccctttttccacaattgcctacatttctagatgcttattataaggtaacacttgtttttcttcacgttcctctcaagtgatccatttgtgttcatgtgttgttatttaaaaaaaaaaaaagtttggtaacactagtttatttataggttgtgcgttcgcaccaagtgattttcctgtcaatgtttcaacacctagtgtttttccaatgtcaatgttgattaatgtcgatgaagcatttcaacgagagttgaagaatgaacaaatatgatgatagctggagaatgatattcgttgacgagatgacattagtctgacaaaaagagttataagagaaaattatgaggaaaacgaggtcggagaaggcgttaggcatctcaatgcaaagacaagaggcaatcttggccccaaaatgaattttgatgtctttgaatcaagattgttggggtaagaactctaacacatttggtgttccaatatataagtggtcaacaatataatgcacagacttaaagggatcaaatgatcacactagttagtgtataattacgtatcccaatgtctggaggcttcacactatgcataggtaagggagaaagatattgtatacagtcttatctttgcatatgcaaaaaagttattttcagatttgaactcatgatcaacaagtcacaaaaatacaactttatcgctgtgaatgttgatgcaaagcgcaaaatagtgacacttcgtgtcgttgataactatgagcatttgttcaattagtttacagaagaaattttagcaagagtggggttgcacgctatgtcaaattactgtgaaaagtgagaaaggattaaatgatcatttttcacagaaaaaataaaaggctcaagaaacatccctgaaaactaaaaagaataggcaaggacataaaaaacattattatggttaaatgaaaattaaaaaaaaaagtgtgttaaatctaatgaatttgttgttcacatgaattcaggattgggttcaagtcttgattgttagacatttcaacaatggcggtgcttgagataaaagtttggaagtgtctaaataattaagattataatatatttcattttgatgtagatttttatctttaatttttattatggggcgtaaaatgtacatctactagttggcgagaccttatgatgtatgagatgtctattttgtaaaaataattaattatttttacattgtaacccatttataaaaattaataaatattgtatacaataaactatataaataatataaattgattatattcttgtctaaccttcaatgttatttttaaaatatttgtacaaattattgaatttttattgattttaggaaaaaaaaatcccatgatagatcgccttataatttagcatttttatttttttgtctttgtaatttattttaatttcatatttttttatgtttcgtccttaaaacaatttaaataatgctttaaataatgaaaaatattatttaaatcacctaaatgacaaaaaacaaacataatttaaaatgactaaaaccatttttatcaagttagtagaacaaaaaatgtttaattacaaaaatttaaaaagtatttaaaccatattattattattgtaattttacatatttttttaaaaaaacttattactttttggtgttgaaactgtaattttacaatgtgccactcaatgactgaccaattcaaatatttaaattttgtgattatataacccaaagcctgaacatttatatgatttaaaaagaccgcacatttataataacacttactttaacacaagtagtgcccagtcaagttaagaacaccaccttacaacagaatatgcaaataagagcaaaggtgtaccaaaaagaaaaaacaaagcaacccatgcatctaacaggttctcgcatctgtgcatactagcttattagttagagacaattaatcagttagatgaaattaatataatcttatagtatttgctgacattttaggacaaaggctatctattcaagggtatcatctgatgagtgttggagtaaaggacgagggtgtcacaataatttgaaatgttgcatggacaacgcgagacaagagttaggagaaaaatagttgtcaaatagagatagagctgccacatgcctcaattgggtgatacttcaaaattaatctctcaaataggaatccgtacacccacattgacttttttgtgcatgattattatgctagattaatgcttctgatatatgtgatttcgtcgctggcaatgcaacttgtggaatttaatttaatttcaaaaccaaaatgaatcaagatttgactcgtggatactgaatgtgaatgacttataatcttataccaaatttatattagaataaagagaacttcccttcacctttttgttttttgtttttctaacaaaaatagttaccgtatacgtacctatttggtgagtagtacacggttcttctctgttaagcaactgggtttttttattttttattttatcagcgttaagctactggattagtgaattatatgagcacattcaccaaaaaaaaaaaaaaaaaaagtgaattatatgagcacgttgattgtgatttaccagactaatcatgtcaacgacgcccacagtaattgagaaagtgtcccggttctgtgctgggctacctcactcttctaacttctgcagttgaattttcaactgcatcacaataagttaaaaattattcactgctagattcaaaactgcatgtacccgttggtccatttgaactgccagtgatcttgatccctagtgaattatcaatttaaatccccttttcccttttttagctggcgccaaaattaatttagtacttaaacatgctgatttttttctcaactcgtattagttacgatgccaaaaacttttccttctatatcactattctgaaagataacatcatatcttctgtgagagaaatgacaattacattttttttataattgacaaaaatttattgaaaattatcaattttggtgaaatttatttattatttaatgattatttctctttacttaaatgttgaatccaccaaaattgataataattaataaaaaatgttaatcacagagaaaatattgagaagaaaatgttacacaaaatatcattaacatttttctactttatgaatataagatcagtttagtgttattcttcccctttatgctcaacaacttaaatgttcaacttttaatatgctattaaagatttaaattgtttaacactgttgtacattagatggatcaatctatataatgagtacattaattgcaattttaggtgctaatggcgaacaaaatttgcaagtcaaaaagatttgtcaactatataactcaaaaccttggtagctatgccttttattatattttatcggtacattcttggtgatagcatgaaaaaggcataaggactgccatataatttgcaggtgcaatatatgaacgcaaagcacctgccaattaaacagaaaaagaaaaatattgcacaatcttgaattcaaatacgaattttaaatatcattattcaacataaattgactcctgagattcagtggctatcagcctatcacgcggaatcaaacttcaacttcgttcataaaaaaaaaattaattataatttttgtatctccttttttatatttatttcacctccacgactcactttattttattttccctggttttgtcgtacccacacgcatctcattttccttaacacgttgcgaaaaaacaattattctaaaactttctccactaaaaaaagacgacgtggtggggcagcttctagaaccttttgcaaacccaagacgaagttgttattgtgcaccaacaccaatacctgctgccatttaaatgaccactatacccttctctcaatcttgtgctattctccatctttgaccgccatataaaaacctctctcaactctcatttcactgcacaaaacaaagctaaattcaaccaaccacaacaacaaacgcaacattttcatttcccattatacccctcatcgcagaagacctcagaaaatatctcaatggcgggaaccctaaatctcacgcctctcaccggtgccggcaggactctccggccaccggtaaggatctcaattcgggcattcacggcgacggcgatcgattcccggcgagcggcgagcctctacgaggtgctccggatcaagcagaacgcttcggcggtggagataaagtcggcataccggaaccttgcgaaggtgtatcaccctgattcggcgctccgtcggtcggaatcggacgaacgggacttcatcaagatccacgacgcttacgagacgctgtcggatccgtcggcgagagcactgtatgatctgtcgttgatggcggcgcttgatggtaatcgctcgttgtcgtctgtggtggctgctccgaatggctcttccggattctactatcagacccgtaagtgggaaacggaccaatgctggtagatagcttccaagtagaagaaaaaaaaaaaacgagaaaatatattttctgacattaacaaatttacacggaaaaaaaaattaaaatgtagaaacgaaaacaaaaaaacgattctgtaaattctgtctcatttttatgtagtgctgctcccaggtcattttgtccatttcgtttgggagaaatttctgctgcaatttcacaaccatacgtctatcggccaccaaaaaactttccgtcgacttaaaaacaattaaaatataaacacttttggacctttgccacaaaatgtattacgaagtcaaagtacaaactaagattttttttttttttaaatagtcattttcatattcatcaatatgagaattaacaattttattataatgaaaatttaaattttaatatttgaaagcgaaaaaagtgtaatttttgattggttattattaatgaaagagattaagtaatacatttaaggagtgctttatatattcatagaccaaaataattatttatttaaaatataatttaattttcatctttttataatttatttgttgttttaaaatttttattgtgataatattataaagtaataaaatcaagttgagttttatttttttaggattaatgtaactactatacatttttgtttgagtctcatattttgtactataatattagaaatttcaaaacaataaataaattatacttattaatcaatattatgtttattattatgtttgttctaacatgttttttattaaagtatttattgtaatagtatgattgtaataattaaacaaaaaggagagaatatgagattaaattatattttagataaatattcattttcgtcttgaatatgtaaagcgttgacaatctcgtatatgaatgtgtcaaataaatttttggggactaaaatttaaatttttatcttttaagaatgaatttatcaatattatatatatttagggataaaaataaatatgaatatgttagatgatataaattataaaaaaaacagatacaaagaaaaatggtgtcaatgtaatgtatatactaatattataatgtatcatcactttatgaatgataatatattttactcgtataatatattaccttgttagtttagattagtgaagcttgtgattttgaactattttcacaaaacttcattaattttgtgattaagatgacttattagcgatttaaatagcctaaataatacatttctagtaattaaaaaaacacggagaaataattgaaaataattattagttcattagaagtattctattctatacacattatgtgggaaccgatttgtcctactgtttcttgcaattgttttttcttttttccttcttatttattttttatttttttagaagtattattagtattactgccatgttagcatctgatatacttggtcaaaggttggtcgtcgcatgaaccatttttatggatgtatcattgctaacattacaagcaaactgctgcagaagtaaaagcacccttccttggctcaaaggaagaggaatccagagagaataatagtccatgatcaaaatatttatataactatgagaaagttcaaacgagagaaaaacacagagcaatactaataatcacaagagcttaaactgttaatattgaatattaccaggcttgaatttttttatttcggcgttggaaaactcagtggatcatgtttttgggtcaagagtaggcttaacctgttttgactacagttgtttcattttacgtagcaagcccatattttatgggcccatataataatatttcagctactggcattagtgtccaaaagcaattagacaagaaaaagaaaccacggccattagttaatactactagttatgttgattgttgggaaaggtgcgttaaattttcaatgcactttttattaaataaatattacacaaatcttaataaacgaaattttattcaaataaattaataaaactcgcattaaacaaatttaatagcaaaaatactaattgtttttcataaatgattggagagagaataattaagtaaagatataaaagaaaaaataattaattcatttaaaaaatatttttttataaaatagataaataaatttttgaaaaattcttataactaaaaacggaagtaataaataatacgtttgtgactactttgttgatgttaatactagattataaaaactggaattgatgattggaaatggaagaaagagacgttaaagtatagcatatgggggattaagtaagtggttagtatctttcagtattaacaacggtcaacttcagcgtatggaccaatcaccaaatttgtagcctcccaaagcttcttgttgtaacggactcaaccacttcaccactctcctttaacgcatcaccttccacgtttcccatgaaacttggcaacaaaacgttcacgttttcgtttttatttatttattataacaatgttattttttaaaagaagaaatattgatgatttcataaaataatcctcacttatacatatttaaacattgtataaattacaaaatagttatcaaaacattttttaagatattgaattcgaataataataaaaaaaacaaaaacagaagcctaaataattttcactctccagatgaatctattcaaattaacttaaattagtggttttttatgcttgttaaataattccctcatccatataacagttgaaactgaatatcaaaagttaattctaaatatatgtattttgtcttgaaaatttaaatatgttcctacactagttactatcttataattttaaatacatggaatgaattatcggttttacttatgtgatatggggcatctaaaaagttgagaaaaagataaatttcttttgttccttttattttattaaagggaatcttgttttaatggattagatagctttccttataagtgaacaaaagcgtcaaatcaaaacgtcttgaattggtgaaagagacaccaatgttgcctccccttccttctatttaccacttttacacttctttctatttcccttttcttttaaattccgcattatctttctcaattttcccaccacctcccgaacagaatcagcacccgaatttcccagatccgagatacccagaaggaaaagattaaaactttggttttttcatcgatctctggggaaagatgtgttgtggggggagagtttgcatgctttgcacgtgtctggttctggtggtgatcgccatcgggttggtattcgggttcggagtcttcaagcatggattccacaagatcaaagacactgttagtttctgcgattcttgcggcggcggcggaggaaggcctttcatcggttatgcaccgccgccattgttctagttcacagcatcctcttgttctatttccttcttgttaattgttctggggatttgtttgtttcttttttataaattagcattcgttagcgttcatatttgtaattacctgtttcttgggattcatgtttgatttaatattcatttgcctttgttacaatgctgtcactattttatctgtttcttttcggggtttcgagtttggttttataattagcgaattgcagaatccatgtttagaaaaaaaagtaatatttttcatcaattaattatttgaagaaaaagctcaatgcttttctaattatttttctttggaaataattatgttaacatatagtaattgaaaagtcattttgttttaccaatttttgtcatcacgttaatcatttgctgttcattcaaattttaaataaatagctttttcttttttgacagcattaaataaatagcttttgtttcctaatttttgaaacatcttattgtctaactaacaaattgatgatacatcaaaggggtaaatgccgatatttgaactatatttagttcataaatttgatttttatctgaatgtataatcaaattcagaccatcaatatgtacccaaaaaaaatcaaaccatcaatatatagttatatactattgaatctcaatgaattagcccgaagtgagagcaagagattcgagagaaatggatatggataaggattcggattgcatcgcacttcttatgtgaggatgaagattttcaacattaatagaaaaaagaattacgtggttatgtctctctgtttgagtcgtgctccacatgtatagactctctggttaaatcataaaaaagaaatgctctttggttaaagtgggttttgcttgtgatggttttctacttgacttgccccctaatattcgtactttgcgtgtttgacataattgattaatcaaacatgcttgattaatggtttgaatcattttaaccactacgcttgttgatactagtatgttttttttgcccccagaatatcctctccaaagcggcgacatattgttcggatgttatcactttttttttgcgtagagaaaccaaatgcaattaattctagagaacaagaaaaatagtttattcttccttatttcatttcttttgaggggcatttcctcctgtatatctggcactagctatcctatcgctgataatgtagaattttttctacaactcagataaaaaggtatatatacattcttataaatcagatttttcataaattttaaaataaattatgtgatttatcattaattttaatggtaatgttgatgtagtttagttttggtcgtaagaaaacaaggggccacaaaggcctagagaaaaaggaaggaaaggataaggcgacccaacccaagagttataatcaattacaatccttaagcccaaatctgaatagccgaaaataagggtgtgccatggaccaaaagaaaagcttgggaaaatgcagcttggataagtttgagtgaagctggacttggattcttttagtaagattttggatatacaaaaacatgatttaaatataaaaaataacatggtttaacttgaataattggaaaagcctctgaatacacaaagcaaaaagatagggaaaaataggagcatcctatctaatacctagcatgggatcaaactcctggagtagctctccattccataacattttcatactgggggaacaaatacaattccaaagaatatcaataaacttggccgggcaaccaatgtcatacaaagtatcattcccaaactcccatttcaagcgttcatagactttctccaaatcaattttaatgactattcaccccttagctcccttcttctttctcatagaatgaaaaatttcttgagcaatcacaatattatcagtactctatctattgggaatgaagttgcagtaatacgggcagatatatctttccataaaaggcctcaaacaatgagccaaaatctgtaattattttacaggagacattacaaagactaattaaccacgtgctccactttaagaataagagtaataagagtttcattaacctcagcaatgacatttggatcatcaaaagccttctgaatcatacttaccacatctctcccaactactccccactcactaattttcttttacatctgcatcactgtgaagaatgaaaaggtaaacaatcaaatcataaatcgtttagatatctgcattaattattaattaaagaataaagtttattgaaatttaacggaataacatacatacataaataccaattccatgcgccaatgttgaaagggttggatttgcggattgtggaagacgagcacatgtagtttccactctgtatgctgcatagcataatcgttgttcatcctttccttcctatgatatgaatcatatgataagtgttgaatgtcttatactttatccaaaaatgttagtattgttatattatttcacctttcctccctcactctcactctgtttctctcagtaggtattaaaatatatataaataaaaaaatcaactcaactcaaatcaattgaactaaactaatatctagggacggcctgtgcctaggttcaagacccgttgctggaaggaaaataaaactgtttagggaaaggacacacatttttatgtattttttttgaaaaataagaatttaaaacttttgataatgatgtgagtttatccaatattaaaacataagaatatcagatttttttttcatttcctttatctcataaaagacatacatttttataatgaaaatccaaatcttttcttgaactataatgtgttatatttctataacaaaaataatatcatgcgttagacagcgggggaaaattactcttaagtaggataaattgatgatacacaacttcagaataaggacatcaccaacaaagagggatttaggtttaaaaaaagaagatgtaaaaaagccaaaggtaattttgaatgagatatatggaatataattatcacatttaaaaattggtcaattcaaacaataaaacctaataaaatattacttcgattcacgctactttctttcactttctatcaacattcgaagcaaagcctactcgttaatacgatgtggacaaagacttagactttgtggaacataattcttcttgtgatcaacgttaacttttagttctaatttccaggtatattcaacgaaaggtttcaaaccacatgttccatgcataacagtcatggaacattggaacgtaacccaggagaccttggcgataattgccccacaagaagaatgaatcaccattcaccaatgatcgataatatccaatgaaaaacagcttcactttacaaaaaggaattatcaattatgttattgagacaataaatctttaaatttaattttaatatatataatgttagcatagaaaattaccatgttatgataagaaaaatcatgttattgatttaataatgtatcattaaactcattaaataatgtggtaacacattgttgaataacaatattataaattttgtatactttttcttttttgttgacaaacaagggattgaggcacccctggaagaagattaatatacttattaatttaagattgcaataaatataatttttaaaaaataatatacttattaattaccgtacttaattaaatttcagcatcattattctcttgtatttcgctatttacttaatcataaaaaaagaaggaaaaatgacatgaaagaaaagaagattgggcagagtatttatgcggataagccaagaaaaatgaagagcctgagggagtaggctcagacgaatgcactaaccaattgtaaatcgtaaaggaacaatatcattatattcagcaatttaatcttaaattattttcagcaatttaattctaaaatctattaacttttctttcaaaattttaattttaaaaacttataaattatttctaaaattttaattttacaatgtatcaaatcacttggaaaaatgcaatcctgaagtagtttataaagtacttttgaaaatgagtttacaaatcacttctagaataaaattctagaaaaaagttcaacatatcttaaaattaaaataaaaaacaattacatgctaatcttaaaaccattatgaatggaaaaaaaatttctccgagtatttaatataatcgaatattcactcataaaaataataattgtattttcataactcaaactcaatattttttattaagttaaaaaaatctggtgtcaattaactcacgtgatcgatgattacttttttgtaattaagacaatacaatctcaaatgtttataataataactatcagttatgcttaactagaaatatttttttttttttgcttattcaatttataaaatcaaagaagacaaatatcaaacacatattatgttaaaatgtaatctttccattgtcattttgaagttaaattaacacattttgaatttttatgttgacttcaacatttcattaaactcgttattaaaataccaaagtctatgaatcaatataaagatgcatcaatatgtttttttgtgatttcttggttaatatatatatatatatatatatatatatatgttttctcttgtaagttgaaaagttcttctcatctcaataacttatgtgtatgatactacctctttttatttatttataaaaaaacaaactatagtgtaaaaataacaggagtaatagtaattataactttttaagatttcttaaacaagtacctattgtgaatgaattttttataattctcaaaatcgcatctcttaaaaattaaggtgacacacttaccattagtcagaacacttcatttgtcaatttcttgcatctcagaattatacacttaaattcattaattgtcaaatagtttaactcagcaaaatagaatgtaaattgttgtaaacttttaatacttatttgtctttgatttctattttctactaataaaaaaaataataattagtagttaattacaagtatgaaattgacactcccaaccgaatctggcccaaatgtggttttgatgaatcgagtaggcggcgatttggtcggttctagctttctaggaaatggggaagtctaggaagagaccatcatttgtggagggagaagatttttttttttcatggtaatttgtgtatccaatacagtactgtagatattccgtaaatataatttttgcaaatataaatttaaaaaaaaatggacaacttttgaaagaaaaatttattcccacgagcaaacacaagatatagagaatgaacgtcacccatagaaggaagaaattttctccatgaaatacttattattagcctataaaaaaattaaatacttattatagatttgtaagctcttctacttgtctcacgtctttctaatttttgcatcatttattatctctggttttcagtacataacacagtagttatatagtacattataatttctcatcccaaagtcttaacatgatttgagaaaaaaaaatcaacttgcatacaatcaattttaatatttagcttttggttttaggtgcttcaagttatcattttcccctattaacattatataatccaggcagcaacttgcttttaaggaccttctcttggtcaaatagaatagaagaaagagcactagttaaaccatggtataattggtatacacgcataatctaagcccttaatcaaactgactattctcatttacattcacatttgacaaagtctaaaaccattcaaaacttaaaggataagaaatcaacaaagtgagggagctctgttgaagtcattcttttagcaccttcccaaacgttgccgcatatataccaaaaagcataaacattaaaaattaagacatcaatgtggtgcaactttagctcacctgtgtcaccttttgataataccaaaaaaaaaaacacattgtcccctccattattattactcaactacaaaagcttttttttttttccctcttcacttatattgatccatcaccccatttagaataaataaacatatcacttctatctctccctcattcacttccattggcctattttagtagtgcaccttttcaaacatgctagcctctgttgaagaagaacttggcacaccaatacaaccaaggaatcaacattctcagcaatcagaagcaccaaattcccttgccaacactagagcaattttcgggcaacctcgacttcaaaggacaaaaccaattatatggtgtgctgcaatactgtgcttcatattcagcctagtgcttatcttctttggaattgcaacactgattatctacctttccatgaaaccgcgaaaccccacgtttgacattcccaatgcaagcctcaatgtggtgtactttgactcaccacagtacctcaatggtgaattcactctccttgcaaatttttccaatcctaacaggagaattggggtgaggtttgagtccttgaacattgagcttttctactcagacagactcgtgtcttcacaaacaatcaagcctttcactcaaaggccaagggaaaccaggttgcaatcagtgaacttgatatcaagcttggtgtttttgccgcaagatgttggtgtaaaacttcaaaggcaagtggagaataacagggtcaattacaatgcaaggggaacatttaaggtgaggttccatattggccttatccatttatcttactctctgtatagcacatgccagatagagatgactagtcctccagctggtattctagtagccagacaatgcataacaaaccgatgatgaagagccaacaaacatgatagaattctttgtggtttcttattattttctagttttctactttattaattaggagatatagctaatggtaaataccagtgtgcaaaacagtgatatgattttttttgtgagaaatgaaaaagagaatattagaggatatatatatatatatatatacacaccatatgattttaattttgatattttattgtttttatttgtagatagagacttgggtggaggggtgttgaagcccttccataccagaatatgttgtgggtggagtttttattttatcttcatctactagtttgttttccagaacgcgcttttgctgaattaactttctgatactgttttcttttatttccttaattgtgtcgtgtcagctgcactaattggaatgccttttgactgttaaaagcagaaaaggacttgtcagaggttgatcattgcgtggtatcaactaagatttcaaaagtatacatacataattttattgtggtgagccttacatgagttacatcccaaaaccatgtcttaatcagaatcttcatatatatgttcgctcaaaggccactaaagcatatgcggaatatccattgctattttctttttatacaaaacggaatatacttgtattgttagtgaccatgaccagttacccaccaagacattactattatttcaggttaacaccacaacggattttgagctatcaaaatagaattttgtagaaaattaattatatgaattctctgaagctaaaccattaatttatagtaggtgcagagtgcagagtgcagacagtaactcggcggtacaatgataattgatgaatgtccatttaagcatatatttttttctttttttttttttaattccttttgttctagcttctgctaagaatgtgcgacggggaaaagtatggccctgtatgggagctattactatacggattacggactaatatgatagactgctttgtatatcatcctgtgttaagtaatttcacattttataaagtataatataatatattactgaacaggaatcacggattggcgttcaactacagagaaacaaacacacttttataagcctaatccttatagttcttggcatatacaacctctcagaagccaacccacttccgcttccaccaacatacttccccagagtagcctcggaattggtaatgttactctgtcacacttaaaaggttggcatgcctatgtttcttctcaaatgccataaccaacctaactatatcgatcccatatcctgtaaccaccagtttatctctatctgctccatttagcgacactgacttcacacctgcgcatccatgcatgcttcccactgttagcttaaccaaccaagtacatgtatacctagatattcttggtcataacataaatattcatggtgtaattaataataagccaagcaagttattttaattaataaaacaaaataaaggtaccctttgtcactgccgcaattttgagggccttccttctgcatccatcacagtccatttgcacctgtataactatgttttggtgtaaggtaaatttaggcctacgaaaccagtatctccagatttgatacttgttgattgcgacctcacgaccatgaacaacaccaatcctgttgtcaagtgagaaattggtggtggctgcttgaagctcagtttggctgaataattgcgcagcagcagcaacatgtcctggctcagcaaaactatggacaggggatgctccaaaatcagatccactagcactactactccttatcgcactgtccactagctcagcaaaactatggacaggggatgctccaacatctgacccactagcactactactccttatcgaattgtccactagctcagcaaaacttattacatcggccatgtcaagtgaaactgtgattgtggtttggcggaggcgtggaaatctactgctctattatgacacatataaacgcgtattttttgagatgagaaggtgcgaggcaaggcaaaagaattggatcagatgagaaacacttgtgtggacacaaccccaaatatcagaaaagccggcttggttgaaccgactttctttttatattgtcgtgttagctgcactaaaataatctcttaatccagaatcttcctagctgttatttactacgttagtttttcttatttttttttttcaaagcaggcatttgaatcctgcaccacccattttgatgatgctttcggggttcagtgaggagggtgcagccgtgcagggacttcgaaaggtacaaaggaaggagggtgaaggagggctttgcaaagctgttgtcacacttttcgaggtttgggaggtgttaggttgggtgtaggagccaatgaggtgttagggttggggaagggaggtggtctcgttaaggctaatttggtctttatcgaattgcttggaaggtgcatttagaattcaaataagggagtgtaggattcatatgtccataacacaatggacataggtcgggcaacaagatccttcaacataaataacaagcaaaggacactgaagcaattaataagttgttagtgtaaacatttggatttgatttcttaagtaaagtgttagtttaaattttgtggataaaaaaaatatagttagaaaaaaaaattctactaaagtgatcaattagatttttttgacaaaaattaatcaattaatttaataataattcccacctatgttaatatatgaaagaaaatgtctctaaagtgagccaaatatttatatatagagagagacacacacaaacggtaatttccttgtatagctagtgactaatgactcaccgagacattactattatccatggttaacaccacagcggattttgagctatcaaatataatttgtagaaaattaattatctgaattctctgaagctaaatcattaatttgtaataggtgcagacagtaactaggttgtacaatgataattgataaatgtccatttaagcaaatattcttttgttttctttgattcttttctttctagttttttttcttccttcaaattccttttgttctacctgctgctaaagaatgttcgacgggtaaaaaaagtacacgcccattattacatcatttacatggactaatataattgactgctttccatcatcctgtgttaagtaattgcacattttataaagtacaatattactgtttctgacaatatataccagcctccctccaacaattatttttgagtggtacgcgccatcaccatttgacattaaaattggctcctataacataataactgatatttgtaaaaatatgtaacccaaaaataagcatgttaatcagaagcaaatgcttcttaggctgtatcatacatatgccagaatgcacccaccccaaatcagtccccaagtccatttagagtatgtttgtttctccattgtcatgctttcttatagacctcaacgtgactgaaccaaaagcatggattgacgtttttaaggtttttaaaaggagaaacaaacacactcatagaagtctaatacttgtagttcttgacatacaaactctcagaagtcaacccacttccgcttccaccaacatactttcccagagtagcatcagaattggccttgcatcttgccagaaatgcctcttgagctttggcaacattctccttctttccaccccatgtcttgagtgtgctttgttgcagtgctcgcccgaatgagaatgagagagtccatggcttcaacacctccaacttgttcattgcattcaggttgagggtggcttcttcttcactttgcccaccagacagaaacacaacccctggcactgcagctgggacagtcctgcggagggcttgaactgtgtactcagcaatcacctcaggtgatacctgcatgcacacaaattaaattatttttctagttaataatatgtaatttttttttcttcctaaaagtggtagaactggaagaccagtagtttcacctaattgcaactacttaactagcctctaagctccaagagagcttcctgaagaaggttgcacaccaagcaagaaagtggcatcaaggaaatttgaatccatacctatgtggaaggtgagagttcgaactgaccagattcttaactactggtgccaactcacattcgcttccaagtaaatcgaacaatgatatttagacacccttaaattactaatgctccaccaacaccaatcatttctcttttcctatcacatcatatcattcatcatacctctactattcctttatctgtgtcaaatagcatataaggtgtccacaaatcttttttgaagtcaacaatattgcaccatacttcattccaattttatttctaagactagtaagtattcaactatagaatgtaaccatacatatggatgtatgattttgaaaatgttaagttacctttgggctatcagagccgggagtaaccatgttgggcttgagaagagttccttcaagaaggacatgctgctcattcagtgccttgtaaacagctgcaagtacagtttcagtaacagcagcacatttggcgatgtcatgagccccatcagtcaaaatctcaggctcaacaatgggtacaaggccattctcctggcaaatgatggcatagcgtgccaagccctgtgcattttgctggatggaaagctcagagggctcagttgggccaattttgaggactgcacgccacttggcgaagcgtgcaccagccttgtagtactgttggcaccgagctccgagagagtcgaagccctgagtggtggtttcaccatttgtgccagccaactcaacaacacccttgtccactttgatacctgggatgacattgttctcttgaagtacctcaacaaaaggcttcccatcagagcttttctggtaaagagtttcctcaaagaggatgacaccagaaaggtattggagggcatctggagcggtgaagagaagctcgcgaagagcttggcggttcgcctcaatgttctcaacgttaatgctcgataggcgcttcccaatggtgccagtgctctcatctgctgccaagatgcccttcccaggtgtggctatgtacttggcattcttgataagctcatctggaattgatgtaagttataacatacatcccatttggaaaccaaagtctaagagttgtaaacatataaagatttagaatgagcttcttagacatgaatgaatcttttataatttgatattatgttccaataactaatgagaatatgatgcatttctcggctactcttttcttgttaatcagtacattaaagtggaatgtttgacaagcttgtacttcattcaatgaagaattgttcttgtttacgtgtgggtgagagatgtgagtaatattaagagaagaggaggagatatgagatactacctgcgtactttccaacaaaggcagacatggttaaagcttattggatatatggcgggaaacagataacagacgacagcacgaaaaaggagtttagccagaccaaagctatatagataaaaatctcaaaggaatataccaagtggtattctacccaacccatgcaaaggaaccacgtgtccagtgattagcctaacgaaggttatcactcttggataaagcaacgagtgatccttcccttgcccaagtggcacctcatccgtttcaataatatatattccactcaactcatgatatataacaaggaaattttgtggaaagctctcacccgtcatcctcttggacttggctttacatattaagatatcaacctaaaggctcttatgaaaattgtttgcagaacaatgtctcagtcacattatttatttttatttttttgtctttttttcagaatcaagttccatcctcaagttacatctttatgcaatttaccctcgctatatattctcaattttgagagtgatagatatttaattaaagaacttacatactcatttatatctatgaagtaaaaatctccggacagtaaaaatgtatcttgataagccagtgtccggcaaagaataagttcaaagaaaaattctggtataataataaaaggtaaatcaaaatttgcattggaatattccgattatgcgtatgtttgtaaaatcaaacaaaagattatgatcaaaattgattttgaacaataactcggagaccagcagaatcttaattcagcaaattttattgcccccttccgcagtaaaagtctcattaatgatgacgaaccaaaaaatattgtgaatttcctcccaagtataactactgtgaagggggtaccaccttctggtcatcattatctgttccaaagtaccggtccccaaactcacccatgccaggtatgacacggaaatcttcattcaaaccaatctcaatctcagatgtcaggatttttattctcggaaatcttttacagaccacatgaacaccttgaggtgcctggcaatatgagagcatatatatatatatatatgcaaatcattaggtacaagaaaagaaagaagcaacagaaaataacaaagaaatggcaagatatatatgatatacagaggaacaacaacaggcacaagtaacttactgatacgagattgagaaatataatgttggactctggtacacccttctttaaaagcaaagaaattgcttgaacagctgaattacctaaagacgaagatattctaaagttaatcaaaatgaaaacaaacaaattaaatatcaatttttttatatacccttattatgctaactgctatgtaacttaagtcgcagttggctactgacggtttgtatattattttaaaccagtaacataaaaaacaccataaaaataaacattatgagaatgacaaacctgtgcctaagatgggatccagcagtaatacatgcctatctgagatgtcattaggcaacttctcatatattagctgctcaataatcaaaggacaagttagtgaatcaccaaaaaaaaaaaaggataagttagtgatcatgaaatgaatcaaaacagtatacccaagcacacgcaaatgacaaacctgttgaccgttgtcaccttctctatgaataagaattttcccaatcttgatacctttgcagcatgctcgtaaagcattttccatactctccccactgaaattagattgcatatcaaatttaaggacaaattctatttataaaaaattgcagtgatcataggttcacatcaaactgagtaattaggaaagaagaactagtttcttagaatatagagaggggggttggataatattttcaaggataacaagtagagtaccatatgcaatctaaacaatttggtaattataaacccaaatcaacaatagatctttctctttattgaattgttcaagaaagtattttagtcaaaactttgtagcaaggataacaatatttaaacaaatgcccaagtgacttctgatctggactaaaacgatacctccggatgatggagacaccacacaacctcttacagaaatccaccccgctgtataccgatcctgcattgaaggacaagtattagcttagctgtaaccataaaaaggttaagacgtgaaacaaactaattctattttgtaaatatttgaaggagaatatcagcaaagatgcagacaggaaagttaatcattttcagtatggcaatcgcagaaattaacatcatgaacagaacatgtctctctactgtaaaataacatgatatccctttggttcccattatatgaagcatttcttagattgggaattcagacagcagaagttattcgtagtccttccaacttggctgaattatgtctaactatgtcttggataacttggaagtttcaagtggtctaagacatagacaattctaaaacaaggctggaaacatgtagttcatgttactcctcatttttgtgacaataatatggcaggattttagaaaccagagatacccaacaggcacatcatccacaacactttctagtgcaatgagaagagaatattgcatccttagttgcacataaaatacaagtaaaggcgaccatcattgaaaaagaacagcttaccagttggagtcgttacttgcttttctgtaaatggaagatgccctaggccatgttctacaacctggtcaagtgggcgaaatttgaccattaatgcttgaagaaaatgccatgccatcactaatattaagagcaacaaatgaaccccatttacataccaaacgaatcagacggtcagaataaaatacaaagtcatgtttcgttgtttgagaatcacgtatcagagtatgcataccccgtatctgcatcgaagcaattattgtgattattcaacttttaatataaaaaaattgaatttggatgttccagatgaacggggaaagatgggatgattgataaagacgataaataacaagaaaggggtacctgaaaagtagactgaatgacgtataaattaggatatattttacacaagtcatgctgaccaagcttcgtgcgaatatgttgtacaatcaagtcaatagccacatgattatctcctccatggggtataatgatatcagcatacttcttggtgggaagaataaagtcatcaaaagccggcttcacaaatttagaatactgcatcaagtatatattataagaaacagttactaatatatggtaaacataaaaaaaggaaatatgttagcttgatttataatcataaccttaaaacagatcattaaagatttaatttcataaaaactgacttcttacatgttttctaatcaatgaaatttcataacagcctctcagcaacatgaactaaaataacatttccaagtcttgaaatgcagtacaagtaagaaacgtgaaagcaaaaaaaccagaagataatcaaaatatgataatggaagtgcaaatggtgtggctgacggtagctacctgatcaagcacagctccaatttcacgagcattgtcagcagtatcacgcttaattcttctagccagacgaacatcggcatctgcactgaacatttcacaatgtaaagtgatagcataacttagtagtgcaacaacgagatataaaatatgcatgcttgtaaatagttagaaggaagacgtaggcaattattaataaaatagaaaccaacaaataaatgtggggaaaaaaagatgaagatagtgtcattagcataacttgaatatgcgttctcctatatcataatgtggattaggaggggggaaatttaagtccatggggctaaaaggaaaatgaatctgacaacagatccatatatagtaagaaatgccgcagaaaaatacaatacagtaagttataaaagttatattggaacttaaataataagggacctgtgtcaacaaatatcttcatattcatcaatgcccgcactcgtggatcatggaaaacaaggataccttccaaaataataacatccgctgggtttacctgcaaaacacattaaaccaacattttttttttttgatcggcaaacattaaaccaacataaaagggaagtatggctgaaattgtattccatataatttcccctctaatggagataaaacgcaagaagaaacatgtactgcatgatttggcaatcattagtacatcaaagtattcatattcaactacgaaaatcattgtcatctcaagcctatgcaataaaaaactattctttagcatgataataaaaactcaaaatagaaaattataatcttggcctgttctgttatgcatttcaagaacgaggagtaaagttactactaaaaagttgaatgttccatatacccgtcttgctggaaaaacatcattcttgtaacccttaaagtcatactttggaatatctactgcttggctgtgcttcaacttgtccatgacacgtagcaattgctcagtatcaaaagcttctgatgacatcaacaacatacattaggaataaagtagctatagcagtctaagaaccattattcacatatataaaaaaatttaaacgttaaaatttccatatcaaaagttgctaccttatcagtttttaggtgtattatactaattatgcttgctaggtactcaagtatcgtaccatacaaaatgaacttttgttcaacctttggaatggctcataatgcatataacacaatttgtaacactctgacatgtaaaatttgcagtggtctcaccaaccatactcatctctaggctaaatgcgagaatattctagctctggaatttcattaacactttcatgtccctaatcagttaattttgaggtaaattctgctttacatctttcaaaggttaatttttccctgacaccacccttgatattcctgaagcattctgagagtaagaaagatggagttgatactaattgaatgtattgaacttgttttgcaagaaatttaagtatctacgtaaaaacataagacctgataaaaacaaaacaatactaaaacgtgaatattattttaggctttctaacccgatcctcgaaaagcattttaggaaaaacagaactccagatataggagaataagtagatttaaaataaaggaaataaaacaagcatccgaataaatttagtgcatgtttcatcctgtataatttcttctctctctctttattttttatttataaaaggacccaagacaaggcctaaacaataaaaacaagactatctaaagaaggattttgatgtagctccggacttttttatccaatcctctcctgagtgatgatgctatataatgtcttaatgtaaagagaaagttactgattaataatgagagactaatgggtacaattgaactgaccaggatggtcaaagttgtaatcttgtactcttgtaagttcctcctcagtcaaattatggtaaaaagaatcctgttgtacaataaataattcatttattacgctcaacgtatcatcatgtacaataagaaacatcaacccaaattctggaacacataccctcaaaaaagataaaagaaggccaaagtacaaagggaacaagtaaaatatgtaataaataaataaaaggttaagggcatctccttcaagcaagtcacacgagttgctattactttataatttttcacttcctcgctgacataatgttttatggctttaataattcaataaaaaatttctccaatctatcaactctaaaaagtaggctccacaattgatcttgctcttttatattttattattcatcttaattttaatttaaaatatttttatgtcatttgttttagtaagaaataaatatataataatttttaattccataaaatgttcacttccaaataactttgcattaatttttaattaattaatttttagaatacatggaaaatactatgtactaataatttaaataaatcaaatcaattataaattaataatatttttaatgtgaaaaaatataaagtaatatattatgaaaacatagtttaatttataaacaatacaaaaatctaagttatttgttaattaaataatttttaaaaaatctaatattttaatatataaaattaattaaagtccattaaaaagtagaaaactctagttgctttatatagtaacggtgctttatttgtaacccatgaaaattgctctccaacatccgaagaataagactcaagttactagacacttctaatgccaaaagagcaattccattgaagatggcttaacagcataaatgttagaaaatacatccaaagaattttttacttttgtcaactaaaaaatggtgtattcaaatgtgttctgttgttgagaaaatcattgacatttggatggaaattttgagggagaaacacatacatgttcatgataaaagaggtgattagaacaacataatacagaatctgacttgaaaaagaaagaggtggagaaattttggtgaatggtagccaatagaatgtcaatgttgcaatgaaaatacaaaacaaagatgataaaatcattccaatagataaggccgaacaaaataccaaggggattcagataatggaggatacaggatgcttataaggcttgaagcattaaccgcaaactattagttgtattcccttaatatctgactcacagactcatatagttataaattctcaatttgatcaccattcaccagtacgtttagaaaaaatcaatggttattacaagcatacagatgctctctctttcatattattttcactttatttttttctcttttctacctcatcatttattacatttactttctcttttatctttcttttttcttctaatctcttcctacgatttcaatctacaccaaaatgagataaatgattggtactttgcaagaattagatacctgattaacaagtacaactcgttggtcatgaagctgctgaacaatcatatcacaaactgatgtcttaccggatgctgctccaccagcaacacctgtgacatacccaaaccaaaaagtaaatagaaaatgaattagaaccgtagataccaaataaaagttggttagatgtgaaattaagacatacaaagttgttacgatcttattttcaaaactcgtgcgtctaaactttgaaacaaagaaaacttcaatgttaagtatgtaagtttgcgggaagctctacttttatattattaggggttagctgtgtgagttaaccacaatttccaactgtaggatgaccaagtaagaggaatgatcagctgaaatgaaattgtgatgcaagaacgtggactagatcctatgtggttcaacttctccgtaagtacttatgaaagaaaaaatgaaataaaattttctcataagataaaattaatttatgcccaagttaaaattagtttttagagaagataaaataaattgtgaagtatgatagtcttcaaaggtaactttgttcttcttcacttaaaaactaatggctcaatggaatcatatgcaaatgcggggaggaaaaagaaagctgctgagatttctctgccataacagaacagcaaaatccacatatgggctctagaacctcagtttatatcatcccaaaaacttaatatatttagtaccctattatacattagatgatacccaacaaacacaagacaaagtaaatgtaccaagtaccaacattgatttatagacaaatcaggaatttatgactacataggcagcttggaatgcaaaaacacacacctatcacgaaaggttgtttatacatgtcagttgctgaagtggttggttgctctgtgccagcctttctttgctctaagccatccatgtgaaatccagaaaaatgaacctcggataaagactccattaagtcaacaactgatttagtacccataggcaatgacctggataaataatacctgaaaatcacagatagagaaatcaataacatacaaatactactcaataaaagaatatgaataacaatagttttaacagcttgcaaatttggctgattggatcaagccaaccatttcactctttggtaatgttactaattttcactaaaagactagccagtagaacaatgctcaagacggattcaccctttaggaggcatcatttgtcatcaagttcacttcaggaattataaggttagctttgtggttaaagggagaattcacagaagttgttaattcgaagtcctttccaaactctcactaatatactaataaaactaacaactaacatttattgattaaaaaaaaaaaaaaaaaaaatcacttcctaaagccatctagatatataccaagggcttttttagtcaataaaaccaaagtgttaatctaaattcctcaagtaatggacaaaacaattaatttccaatctcattctctccacgccatgatctatcaaatcaaattaatcaggacatcatcgacatatacatgacacgcttccatccgatccgatgaacaaaagacatgatatcatcaccatgcggtgcacgtaacaatccatccaaccagagtcagtgagaggttatatttgcgtgcgaagtgcaaagtgcaaagaaacagataaattaaaactggttcagttccaacgtgagcgaattagcgcagccattgcactaaagacagggatagcagtgatgaatgaatgaatgcagtttaaagttaagaaatccagatccagttaaatgaggagaggagacgagaagatcaaataaccaaatgctgaacgatggcaaaacgtacctgatgaactcagaattgtacgaaatagagaaagaggaacggagcgaaagaaagaaagaaaaagggaaaatgtatagtgacagacagatatgatgctatttggtgcactatcagacgctgcctatttacccttttctcttagtttatatatatagtgacgtccaatgaggcaatgagctataaacagaccttgatcttcaggggatcttcaaattaccaccttcttccatcctgaattgaaactactacactgcttcacccaaaagcatgcgctacgttggacaaatcatttaagctattttttttttactaactaaatacttattttttaaataatttctaaatttttttaagtaatttttaatattttttaaaatactatttgaaataatatttttttaaatgctaacttctagcatattttatatatatatatatatatattatctttaacatatttattcaatttttttattatcctttttagaaatgttattttacatttttaaattacttcaataattaatttgattaaacacttataatttaataagttagtttataagtcttcaatttttaactataactaattttccaattttctaactttcaactaacttttcagctaattttgtcaaatataatcaatataaacaagtgctaatgtccaaagtttatttaaaactattgatcgatttcattaatgtgttcataatgcaaatgaaaaaaaatattaaatgtcttattaaatataaggattaattgcattttttatcctgcagggtaattgtgtaattttggtttataggttttagttgcacaaattgagtcacaagtattctccaaagaatataattaaattcgtgaaacaaacactccctaataaattttggtacggtagcacataagttgacgatgataatgtgaagtgacaattaacatattgtcttacacttatattaacatagcttagttatacttctagtctatcaagccttataattgtgagagattaaaaatgcataagtcatattaacatatgtgttagacaatatatcaattatcacgtcaatgttatgcaacacattctattaaaaatatgttatcttttttattaatatgtgaggcctttttaatttataaaactaataaaaaaattgccagtaggtcaaaagcttgagttctagttattttactttggtttaggtacaatacctagaaaatcaaaagtgcaattaagtttttaaacaaatgatcaacaagcaatgggttaagttaagtggtgatggatttatattccttgagcaagtaactaagggagtaagggctcaaattttaatttttgtgcataaagaaaatcaagtcaaaaatggcaacttacctttaaaacctttagctcttcaaagaatattaatcttcttataatctataatttcagttttttaataaaataatttgtttctaaaataagtttgtttgtttgggatcctagcttaaatttagaagaagaaaaaattgaagaaaaaaaaaaagatgtttttacagcttattttctgtttcggctatttttatactattttattacgtaaaagctaatcttttgttgcattcaaaaatatcaattatttttaaatcacttttcaacaaacttactcaaataaaaattgatcatgattatgattgattatacaaataattaactaaacatataattgattattcaaatagtctaatttttaccattatttcaaacacatctaaaatactccttataataccaacaaatcgttgatgcaaatatttttgtattcggtcaccataaataaggtgtcagatttgaactttgtgaataaaaaaatatttttaagagaaaaaatcctattaaagtgatcaatcagatttttcgataaaaattagtcattatcaaaattgatagatatttcacaccaatatcataattaaaaaaaatactcctcacaaccataagtgtatttttttaaaaatgaaataaataaatcatggaataccatatttttatataataatttttaaaatatattttttttaatttcttagaacaatgtgtaggaacacgtattggaaattggtagagattagagaaacggaaaatcagatagtatacgtagcgtatgggtatggaagtggtagagggacagggacaggggagtgtggagtgggtacgtgtggtgtggttaatgacttaatgtgtctatgtttcagtgtggaaatgtcactcactagactgtcatctgtttgggggccccacgcccgcagtatctaatattttgagcatccaccttgacactgaatctcatgtcgggcctaatgccttttcctccttttctacacctttcattatttttaaacaataattattttaaattcatttctgataatatgaatttaattagattagatttattcatatttaataatttacacatttttttaatatgtcatttaatatatgacctccttttttatattattataatttaatttattcttactttaaactaactaaatacattaatattttattcttattaaatatttcttaatctaggttaatatacgagacatcgaccaacgtgtcacattttttaaaaaaattcatccaaatgtcacgcgaacagtagtatttcccatactgtcacgctacctatttgatccaaggcccaacgaaataagtagctgatgtggtgcaattttgtttgtcatgtacttcgctataaaggctagcgaaatacgcggtcaacaacgggtaggacacgtggcagacactacgtatttcgctagagccaaacaaaatatgtggcattggaacacgtgtcacgcatgcatgaattggtggtgatattgattatataaacttcaaacggtcataacttttgatagaaacgtctgattgaggcgtacgatatgttaaaacgctcgaaatttataagagaaggtctagacaaattccctaaagggatttggtcaactatttttttcctccaaaaaacgcctctcagtatgtgaaaattaggatttaggattcaatcatccaaaaaattccttttttctacttttttaattatttaattagttaatttaatgctatttttatttttttaattacttcttttaatttcgagcattttgacatatcgtacatctcgatcggacatttctatcaaaagttagaccatttgaaatttatataattaatatcaccaccaattcatgcatgcgtgacacatgttccaacgttttttttttttttcgttgtcacgtatttctcttggcccccagcgaaatacgcggccaacaaaattgtgccacatcagctacttatttcgctgggccttatagtgaaataggtggcgtgacagtatgaaaaatactattattcgcgtgacatttgggtaaatttttttaaaattgtgacacgctaatcgatgtctcgtatattaatcgtaaatatcaataattttacagaaaaaaaatatactttttatggacttaaatataagaaaggacctctcaaaaaaaatatttaagaaaggaatgtccaatttaatgaactgaattatagcaaaataatatttttcatcgacttaatatcaactaatttaatcttatttaagttattattataagaatattcttaattcaattaaaatgtaaaagttatcttccattaatatgattaaaagtagttaaaaaatgtagttctttttttaaatgaaattaactaacaactttaaatagtataaaattattaattttgtttccatttgaatttagaggaagtgagtgttaaagatgattaatttttttctaattgtgtttgaaaaataatttcttatgcaaaataaaacttacttcagtgatatctaaattttaaaagaaatgaattactttttaactatcagaatatccattgtgcaaacatatatatatatatatatatatatatatatatagtaaatagtgtataaagtatgctctcacgacaacacaaagggactaattaatattgagactaaatgattatagtaaatagtgtattaatgtatgctctcacaatataaagggactaattgagaccaaatggttcaaaggagagaaaggattttaatgaagagagaaagaggagagggattttaattagacattttgtttgggtgagacaatgggagaagaaaggttttaataaaggaaggagatcaatgtagcctttttttttatttggttcataagagagtatgaaattttaaagattaatttactttcgtacagttatgattttaagtttaaaacgttgggatagtttacgtcttaggacactttaaattatttaaattctctcttcatcccttcaaatccttcgttagaagggtgcaaaaattagatacttcatttttttccattctcttatattgttcccaaccagtgaaggagattttacattattgttaattatgaactgcacattaaatttgttaacttttatattaataatcttaaaaatcatatttatgatgatttttaattcattggtaatgtaaaaaatttaagactaactatacatcaaaattaatttttttataataagcattttaagtgtcatttttaattagttaatagaatgaaaaattaaattaatcaaaattaaacttattaattgtataaaaaaaattaataaacatccgtagccagtataattattttatatcatcaaataataaaaaatatttttttatgactcttaaggtaattattaaaaatcaataaattacatatagtaatttgttattgaatataatgtaaaagattgtactattatttgtgaatatattatttattcataaaaaattaaatatgtgtatttaatattctaattgaattttgtatacaatattaagaaaataaaagaattgttaatttgtaatttgtttgttataaaataaatatgacattattcttgatgtacgtcatgtcgtttccgtcttacttctcattttacccgtctccacttgggtcccactaattgtcatccacgtctcgggcctgattcacagtgattcaatcatgccttgaaaatcgaaattgttgaaatcgagagtattctcttgtgtttaacactttaactatactattaaatcaaatgatcaattattgtattagtcaaataattataaggcatgattattttaatggagtactactattatctctggtcttatggacagtgtaagcaacagattgatattatctttcgtcctaattataaaaaaattattattttaaatcctctaaaaataattaattttaaatttatttagagttaactttcatctatatccttaatttattattaatttcgtttactagatattcattcattaaattatgaatactgatattaaatgtgattattacttacaacattcaaatttaaaagaatttttataataaaatttgaatctatgataacattaaatgtgagtttttatttattttattttaatgattcatcatatgtttcttatatatagaattagagataatatcattttatgattttaattaatttcattcaattatttatgtaatattttcttttaatttatgaattttcttttccttttaaaataagtacatgtattttataagtttccctttattaagattttttgtatttaaaaaatattaatattttattttattcatactttatatttattaagtttgataataaaaatatcaataaagtaaaattatggaaaagataagttgtaatattttcatatttatgtaaaaaaaaggtgattccacaataattagtaatatggctaaattaaaatatataagtaaaaaataacttacatttaagagtcaattttgtacaattgagttagactgaaacttcaattgtaagatgatatgtaagtttatcccaatgattatcgttggacttattgagtcattcactagtgagtcattattagaccaattacaaatgttaaatcatgcaaatattacatttgagatgtttagtcttctacatgagaaaagatgcttgagatctcatcaactaataatattgacaaataaaagtatataagtggaagagtaaccttcacctcataagttgattttgtagaattgagttagatcaaatcttgaattataaaaaaatattaataaatgttaaaattggttatgatgcctcttgcgcctccatgcatgagcaacctggctcaacaatgtagtcaagctttgtatcattagccatggcagcttgtcactcttattgtgttgccatagccttatgtctacaaattgaagctctcagtggtactcgttcaacttgggatggatttggcatgtcctccctagagcccacttgacctatgtgtccaatataagatgtacacaacataacaaacctgcaaatcaatataaatttaataaacatataaaaacatacattgatttccaagtacacaagtaaaacttatttatgttgtgtatttgattaggtacatgacataaacttatttttgttgtgcgcctcatttaggtatataacgaaaacaagttccatcaaatctttaagacggaaaaaaggagcttgaaatgctctcttgtgaagtcacaatcaatggagtttaaaacactttgattcaacaaagttagagtgtgatggagagaaagttcaatgggggaagagagggattggaaaagggggcgtgacaccaaaaacaataaaggggtcaagaaggtagaagaaaaactaagaagtgagggaaagggggtgaagggtgttctaactaaggtgtgtcttgaggggtacgaaggaataagggtatatgcatctttttaatgtattgtggtaaatagtaattgagagggtgccaatagttatgtccttaggagaataagcccacaggtcataattgaattaaatagtttcttgtgcttaggtgctaatttgaacattttctctaacaaatattgcaccaggaatatgttattggacctgaaatgtttataagcagggattaactttctacaccattcatttttccaatacacccaacatgcacagtgtaataccaattttacccttctcataacccgtaagttgcataccaacatacaccattcgatttcatacggatcgacaatccgtaagagtcatacggatcgacaatccgtaagagtcatacggattgacaatccatatgactcttacggatcaacaatccgtatgagtcatatggattgccaatccatatgattcatacggatcggcaatccgcaagagtcatatggattgtcaatccgtatggaccttacggattgccaatctgtaaaatcaatatggattgccaatccgtcagcttcctccgtcagtgcttgagttgcagagcttacctccgacggcgaaccggccaacgcaacctccaccaacactagccacgacctccacaaccagctcaacaatgcaagacgcacccaacagccaacaacagcacgcaggagaagaaaaccaccggaaaaagaagaagaatggcgaaaaggtgaggctggtgtatgttaaaaatcaccaagaactttattgtcatttatgaaaaatggtgggtgtatggaaaatttgcctggtatgagaagttaaacccttataagcatcatgtatcaaatgctccaacccaagatggtcattctagaataacaaaaataaataattttatggacccaaaagcaaaacattaaatgtcttcaaggatattcaaaaacaaaataaaaaaaaatatatagtaaaaatatatttttgtctgacagtactttaaacaagaaaactttaaaaaaatatctgccactaaacaaaataaaaacaatacttctttgaaatttttcttgaaaaaagtggtggaatgtggacggaccgacagacctggtgtctcaatggaaaatactttattcgttgtttaaagatttttgtaattagttttcttaatttaatgtattttttaattactttagttaattagcaaaatattttgctctttaataaaaaaatgaattcttattttttttaaaaagaaataaatggcttaagctattgttttatttttatataaataaaaaataaacagaataatatgaattgttttatgtgacttaaaacaatgaactaagattagagggtttgcatccgagatcaccatgaaagagttgttgctactcgaactaattttagaggcccatgtctaacatttgcagaaggagaagcgtgggcactattaaaaagattagagaaattaataaaaaaacggtaaaaaatagataatttaaacatcacaataaaaggacggaactaaataattagagaagttaaacaatgataataaataataaaaacatgaaaataataaattaaatttaaattatacaataatacttgtacaaaaatctaatttatatgtaaatagataaaataaataaaaaagcaagcatctaccctatctaaattggggaatcaacgttcggaaaaatgtttgaattttggaacattttggctctcatgtttctttccacatctaacgcatgtcctggatagaatatagttttatcatatgcctttattcccgtcaacaatgggtcccgtaatctctcttggctatgaatttttatttttaactgtggtaagttacagaaataaactaaatttaactgtggtaagttgacaacaggccacagttgccataatctctcttttcaattatattttttcttcttccatttgtaagattgaaacccaagtgttaattgtgtctatttctttttaaaacaaaaacaaaactcataaaagttaaaagaaagcaaattttggggagcaaaaaagttatgaaaggcacaaacaatattggtacgacgtcattcagggcgaatcgtgccgttcggtgggtcccacagaggaccacagttgccacctaatcagacgccacatcggatacatacgccgttaagacgttgtgatcccccgaggacacgggagtgacggagacaccaacgttcaaaatgcaagttcaagtttaaggttgtttttgttttgttttaagttctctttctttctgtttctctctcaactctcaacacattcaaaccaagcatttaatataagcctcttcgcattttttaacgctcattcatcatcaaatcaaatccacgagaaccctgtttctcctcacgcttctgcctcagatccaatcttcataacccaaagcttcactttcccaggtattttaaatgccaagttctttttaaacccaaaacaatttgaattttatttttcggtggttggattctaatagtatattaagaactgcattgaagcatttctccaattgttggtgttgcaggaaacatgccacaggaaaccttaccaaactctaatttcatatctcctcttaagagaggattgaatttgaaaggttcggcggcttcagcatgtaacaacaatgagactttacacagtttgacggaggataccatcaacgatcatgaattggctcagagaaaagcagaggaagcaggtatcaactttgattacgattatgtcattgcacattagcactgttctcttgttacactcgctatgtgttcgtaattgtcacctaatgcttcatcacaaataaactatgagttgggaacttagattttatcaggtagtactttttaatatttgtattctgaaaacaatatctttgagagcataggaatttaaggttgtcccccaagattgaaccaaaacaggggagtaagaacttagttttagagctcactgaaactagaaagcactgatactatctgtgtttaatttgaagtagttaataatatttcttctaaaaaaaaaaatccaaagacccatttaggaataatgaacaagtgatacttatactaatactccgcaaaaaaagacttaatcttctgttaagattaaataatgaaacatgcttattgcttgaattcaggcacatttcttggaaaagtttcattatttgaacataaatatctttactactctttttttttttttaataatatttttcatatatactcattttaaaaatataccctataattaaaaaaacacccttaaataaaagagaacaacgttttattgtttcacaataatgtttctctttttttttttggcattataataatgtttctttatagtcatagaaaaagtttcttttgttttttccccatttcctctggttttcttagcgaaattgatttgtttcttacattttcttttctattctatctactaaattattacttgcacttgcacattattgctttgtttaagaaaagggaaaagggaaaaaagtattgtataaaaaaacaaagacaaataatgaataattattgtaactagattaaacgaagtgaggctggaaaagagaaaaagaaagggacagaggacaaatgaaaagatcgtggagcacaaaattatatgcaatgcctggggatgtgttgtgttgctctaaaatgggatcactcccccagcacaccagcattcaatggtggcgtgggtctttgacgttgttattcaaattttgtgatttaagcctggtcgtttaaatacatgtcaactattaatttaagaactagtactgcttgaaattcagatttaaaaacccaccaaaatcttgttctattggtgggataacatttttctttcactgccgaatgtaactgactttagtttaggtttatctatttttaatttttcggtaattatttatgtaaaactttaaatcaagaatgtttaatattttcttttaaatttataaccctattttaaaagtaattttatatggtattcaaataaagtcaagttaatacagtagtatttattacactactttacaattaattattcttttcaaaaagtaatatggcctaatttcaaacaggaaacaccatgattttggtacccatttaatgcaacactgctgtaaataacaatcgtgactagactactttaactttaacctttgattaattaaaattcaaactttggcctttgtttaatcagaattcacaaatataaaagcataacagtaaacgacatttcttgagagaatattgtttttttgggtaacatttcttgagtatgaaatgagagtagacatgttaaatttatttatttactcttatgaatcaccattatacctcctcaaagaaatttaacgcaagtttgacatgattttttttataaaaggaatagcgttacttttcaattttaaaattcttttaatgaaattttgattgaaagactatcactagggttgttctaatattgttgtaaaaaaaaagttgttctaaaatgtgaaaattgggaagtgtgtacaagattttaagttataattttgttttttttattataaaataattcacaacatttatctagcacatctgaataaaccatcaattctcttcttaaaaaaaatcttgtgttattgtaaaaaaaataaaaaagtgtgcatgaaacggcggcgtatagacaattggacattacccgccatgtctttgttgttagttgttcaaatgttgtttgtttgtgcttgtgagatcagcttcaaggaggtacgtagcagcagaatggcttcggcaaatggacaatggcgcatcttcatcactctccaaagaaccctccgaagaggaattctgcctcgcactccgcaacggtctcattctctgcaacgtcctcaacagagtcaaccccggcgctgtcgtcaaggttgtcgacaatgcggtggtcgacgacgtcgccgttcagtcttctgagggacccgcccagtccgcaattcagtatttcgagaacatgcgaaactttctcgaagccgtcaacgacatgaagcttttgaccttcgaagcttccgatttggaaaaggtgaccatgaccctcctcccctttcacgtcaagatactaactttgctctattttgttaatggggttgagttatgaagcaccgatacttttatttcgtatcggtttggatacttcacctatggctatgtgtatatgtccaatgcatgaatttcaagaaacattgtctctttcatgaaccaaagatggaaattattcttatttgtagacaataggataggaagtgatttatgattacaatgatttattgttggaaaaaccacctaaattgtggtcacccctagactgaggggtgtgttgaaagtcccacatggcggatagctgtgggcaaaagggagacatgttgaagtctcccattgtctaaagttagtgccgagatacacggtataaatggggagtaatcctcaccttaaaacttggttttgtagaattgggttagactcataactctctttctgacatttataattttattttgtttttagtaatatataagaagtatgttcttaatttggatttgtagaattgcaattatatatttattatgttttatgattttttatacatatctatatgtgtatcttatacgtattgtatcctatatatttctagaataattgtgtcgtattggatacatgtatcatatatgggcatcataggggttgagttttttttgtaggggggttcgtcaagcaaagttgtggactgcattctctgtttgaaagggtattatgaatggaagctatcgggtggggttggggtgtggaggtatggtggaactgtcaggattacttccttccctaaatggtcttcttccaacatactgggcactgaaagagttgttgatgagaccgagtcatcgcagtttcttcatctgtctggagaggtttcagttgaagaaaccaaagctgctaatgctttggcttctgtttttgatcagtttggactcaaacttctcctggcttacctcagagaggctgatggggttgatgatctgcctttgaatgcaatggtaggtaagatcctttcctatgtggtgtgattttgtaatttttaggactggcaaattagattgttgtttgaaaattgttttgagaaattaaatatatgcatgaagattcatttgattcatgtgatcagcaatcttatttgtgattgggtgaaattgtgtaggtaattgatactttgctcaggaaggttgtcaatgatttttctgcattgcttgattctcaaggcactcaggtacttcagaaattaatgcatcttttttgtcttgctatcacgtttgtaatgtaaaatcactttcagtgtttgtaaggttacctaaaatttaacaattgtccgcagcttggacatttcctcaagaaaatattgaaaggcaatactggttgcctctccaagagagaattcatagaagctatcacattatatctaaatcaaagaggtagtttggcatcaaatgaattctctaaactatgcacttgcggtggaaaacgcgatagtaatcagcacaatgtcagttattctgccaagcatgctgaaataagtgatgcccagcaaaaagagctccaggtataaaattgggaaatacaatgtactgctttagatgatttatcatgcggtattagattagcatcattcactgtaatggtgtttttttccctggtctatagaaactgaagtacttatatgacgagataaaattggaggtcaaacaaattcaatccaagtgggaccaagaattgagaaggcttggtaatgatccaatgacttttttttccatgaaaaatattcttcatgtatgtaaaatcttttataatgcaatattctttcataatgctaagtcgagttctatgtactacttagagaatcatataaagagccttgaagaggcctcctcttcctaccacaaagttttggaggagaatcgctctctttacaatcaagtacaagatctcaaaggtacacaagaatccgagatgctttttcaaggatctacttacatgatttatgtattttaatagatttgcttccttacaggagccattagggtctactgcagagtgaggccattcttaccaggacaatcaaatggacaatctactgtagattatataggagacaatggaaacataatgattatgaatccccataagcaaggaaaagatgctagaagggtattttcattcaataaggtgtttgcaacaagtgccacccaaggtattttaattttttgacatattattgcaaaatgtatagggccagcaaatactttgttctatgtgattattcctaaatgactctctgtaaaatgtagtaaagatttgaaaataataatggacattttttgacatgttgttttagataatagagatttggttatgtaatgaagaatgaacaaaaacgagtatttgtatactggattgttaaatgataataatcatgatatcttatgtaatgtatttgttacaaataaaataatcttttttgaaatttatatcttctctgtcaaaacttatatgatgatttttctttgtcatgtgcagagcaaatatatgctgacactcaaccattggttaggtccgccttagatggctataatgtatgcatctttgcatatggacagactgggtcaggaaagacctacacaatggtaacattacatacataaaaattctagcacatagaagcaatctatcacaattttatgcatttacttaaattgaagtgttgtcctcattctaaattctctgtttttattgcatgcctcataagaaagatcaaaatttatgtgttttgcactgaaattggtgactttcttttcatgtactagtagaaaaatgtagatttttgtccactgtttgtggtgcatgttatggatacttgaaatcaagaatattatgatttgttatggtacgcaattcttttaatagtatcttatcttggtttggagatgtttcttcttaaaaaggagacaattaaaattttaaaaagacctgcatgttattaaatatgttttcatcagcacaaagaaaactgattgtattatttatggacttgatcaaaccttaaccacattgaaagtgtgatatcacaaaatcattttaatattgtcttatcatttttcttatgcatgtgcgttttactgcttggatagagtggccctgatctgatgactgaagagacatggggtgtaaactatagggctttgcgtgacttatttcatatttcaaaggaaagagcagatgccataaaatatgaagttggcgtccagatgattgaaatatacaatgaacaagtgagagatttattagtcagcgatggctctaacagaagatatccttcaagcccatacattctgtatttctattaaattgtaatcatttttcacttctgtatatcaaaactttttgcatactcccccccaaaaaaacaatatcatatatttttttggcttgttcatttccttaacaagacatacattagatatacgaaacaactctcaattgaatggtcttaatgtgcctgatgcatctttagtcccagttaattgtactcaagatgttcttgatttaatgaaaattggtcagaagaatcgtgctgttggtgctacagctctaaatgagcgaagcagccgttctcataggtaaaatttcttcttcataaatattgatggctactttaaccatataatatatttttcttaaataaatttctttaccatccaattgcagtgtgttgacagttcatgtcagagggagggacttagtgtctaactccactcttaagggttgtctccatcttgtggatttggctggaagtgagagagtggacaaatctgaggctgttggcgagagactaaaggaggcccagcatataaataaatctctttctgcacttggggatgttatctctgctttggcacataagagtccacatattccttatagaaatagcaagctcacacaagttctacaagattcattaggtaacaagcagacttaaattgatttttttctctctgtacacattcctcattataattggctagaacaaacttaaaagttgggattgttttctttttcagcttcaaccaccatctttttctactacagatttttgccctctgttgttttaattgttttttagttgggaaggggttgagatgggttgattaatgaattgcaatttaaatattgatattaatgtatttggatcattccatagtaattttatatttttaatttctgtataaaacaacttaacctgtgttttttccctctatatcaataggtggccatgcaaaaactttgatgtttgttcatataaatcctgaagtcaatgctcttggagaaacaattagcacacttaagtttgcagagagggttgcaaccattgaacttggtgctgctcaatctaataaagaaactggagaaattcgggagctaaaggaagaggtttggtttttggtcataactatagcaattttaaagttaactttagccaatattataacagtttgagcattttatagatatcaaatatcaaatcagcattggagaggaaggaaactgaactacaacaatggaaagctgggaatacacgaaataccatagaatctcagaaagcaccaagagctgtttcacctttccgtttgcccaaaaatggtaccagtgacaacatgaaacctgaaaattgtcaaagacccatggatgatagaagctctgaggttattgcatgcttatataaactttaatgataaatttggttaaattatattaggaaattgtatcacaatgaagtgtaatttgtactctctaaatctgaaattatatttacaggctaaaacttgttcttcgggtaagcaaagaaggtcaagatttccctcaacatttatagagaaggactccatgccaaaaatgtctcttctagctgaagaaaaattagtgagctcagggaaaggtagatcaccatcacctccagtcaggaggagatcaatatcgactgatagagggtctgtcattaaaagcaaggtcaaaagtgacacatcagacaaccaaccaatcttaaagcatccatttccaactagagtactagtaaataaatcgcttgtcacaatgccaatggcctcatctacagagaataattcaagggtgaatctgcattcacaggagccagtgaagcaggataacactaatgaaactctcttcaacctccagatggtaaactccaggaaagttcatcaagaacacgaagaggaacaaatcaagcaagctcctggttcagtaagacaaggtggtactaggaacaacaaggctgaaagtaaggccaaggttaagcattttcagcaattgccctttaggattcaaaaggctgatatgatacctggttttgacatggaaattggccgtgaaatgaccatggaggcacttcggaaaaacgattattttgagccagaaaatgatatacgcctcatggagtctgcagtcaatggtgttgtaaatattaaaaagatacatcagaacatctctaggaattctcagaacattggatcaaggtatggcttaaagaatcattaaaaaattatgctatgctcgttgatttgtttcttctcattgaaaatgacattattcaaagcttgattgataaatgagtattattgtcacatgcagaggaataatgcaagcagctgagcctttattgtccagcaaagttgaaaacaaaattttactacatgctacaggtcgcaatcttaaggaaggcaccaatactacattgcctgaatttagaaggagccgatctacgccacgtgggaagttttttgttttctcttgaggatttcaggttaaaatttgataattttttacattatttatttttgtacagtgacaactattgatgtgcatgttggagtgccggctcacataattttgttgactgaggtctcgaggtcagtttgtgcgaccttttcctctgttttcgtgttatgttgctcgtttgtaatttaaatttttggatgtcattatacttctgaaatcttgaggtgttgtgctacattgataagaggtatatttactgcattttatgaattcagcttcccattacaaattcaacaaaagtaatggaagaaggtaaaaataatttattgaaaagcttgttattacaattgtacaaggttgaatatttttttaattataaaatattgtatttttttaatatattttacaaattagtcctgtatttttttttttttttagaaagcttctactgttagcattccatttcatatcaacgttcagactttagcgtatacatgtttcacattcagtcaaattattatactcccgtaactcgcccatggaattattgaattataatctctataggacgctacatgtgtacttaatggttataaaaatgaagaactaacaaccaatagttatgaaaattgacatcgaaatattaggtcagtgagtcagatgtttagttggagggttatttattaatccggtatatatattaatatttttaaaaatatatataatgtatctaatataatgtgattaattcatatttttattctctaaaattaaatttattgtcacgaactaattataaaatattatatagttatttattactataaattattattattttattggatattattattaaattattaagaaaacttttattttttaagactaaatacaaaagttatcaaataatcataaataagtttgttaaatatgtataaaacatataaatattaaattatattatgatcaatatgataataattagttattatatattgttattagataaaaatatatattataggattatattatatgttattcaatgattaactattaacaatttaacatataggaattgagggaaaaaaaaacttgataggatcaaattaggccaacttagtttgggtcaccatatttgaccaaatttgattaggtcaatctgggccaaactaaattgaatatatttccggtcttttattttaattggaatgctcagggcactaatattgattgaactagtcaactaatttagaccgatttttataactatgctaacaacttgacctttttgtataaaattctaaaatgagagactgtataaaaagaattgaaatattttgaggagcctttactctctctctcacacaacctgttcaatgccaaaacacaggaaatggtcaaaggataaccaggaattgaggcaacaagatgacgatttccaatataataattgatgtttattgctttagaaataaatttaagttcaatctcatcagaatattaaattagtttttataacttttggcatataaatatataatatattataaatatagggttttctctcatggatataccaatttttcagttagtatagcaaggtgcataaaaaatttagggcagaaaagccaactttatcttttattctaattctaataaactcattatagggataatatagtaatttgacataatatattaggtgcttctctctcctaaacaaattctctcaccatgttttcggatctgcactgcaccctcctcgacatatcatcctcaatcgcggcttccgttttgctaatttgcacaacacggttttgctaatatcctctgcataaatatggaactatctcagttgttattctaaattttcggtgcaccttactaatgcacaccaactgaaaatgtggtgtgtgcatattagcaaaccccatatattaaatttaagtccaacctcgtcataatattcaatttaatgtatttacaaaataataataacaatggaaggattttctaaaagcatgctatattagtacctgataacatctcgaccagcacattcctttgatgccttttttccaaatatgacgcttactaaaattaattaggttgaaaataatgcagaaaacggctctagtagggttaaagttataagtgcaacttatttccattttcatctttcaatttgagagagacattaatctattaatagataaaagcaataaaaaggatcatatgttctcgtgacatctcattgacaaccacaacctagattttgttcctcaaagcgtgtcttaattttcacataaattctcaacattgagattcattagtcattcaacctttgattaagaacccctttgaagctgttcgtgttttgaatcaacaaggcgtgaaattaagatgatggttcattgttctattgttagaagcatctttgatgggtttaccaattataattctctttgaccattggaggccaaagaggatcaattttcgatcctacaagaagataagaaaatcatatacatttgcaggctcaatccagacttgtccaagttatagaatctgtgatgttagccattccaaaaccacattccaggaagaaaacaacatgcaaggataataaagccacgaaaatagatgcccctcagagttttgtcacctttgtttatcaaaccaaagtagcagaattgttacgaagtataacagtttcatggtgcaaggaccccacgaatcatttcctttccatgagcatcgacaacactttggaagagaacaagtacacctgcaagattgatttggaatccgggcaatcttggggtaaaaagggtcttagatcatttgaaatagcaggtgcaagagtagacattttttgggattttcggcatgcagaattctccgccacaagtccacagccttgctcgggttattacgttgccttggtttacaagaaagaggtgcttctgttgttgggagatttggagaaggatgcttatgaaagaaccaaatcaaaaccatccctagatgaggctaccttgttgtgcaagagagacaatgtgtatgggaagaaaatgttttgtaccagagccattctggaagatggtaagacagaacatgatgttgtgattgagacttccctttctgggcctgatgatccagaaatgtggattaacatagatgggatgttggccagtagaataatgaacttgcattggagattcagagggaatgaaatagtgatggtgaataatttgcctgtgcaaatcttttgggatgttcatgattggcttttcaccaatgaccttggtttaggccctgctttctttgttttcaagccagtctttttggaaactactagcgattctaatagcatagaatgcctagaaagaggtgggggtagcaacggaagtgaattactagaggagaattcatccacccaaggtttttgccattatctttatgcttggagaattgcttgagattcattgtgtgttctccaaaaagtcttgatcttttttggtagtaaagcaaaaaggtgttgcttttcatacattttctttaatagcattgacatcgagttattgaaaacagtgtctcttgcccctttcttatttttccttccttgagctatttgatatatatgaccaggaaaaatagtaactaaacaactagcttaaatttttaaggtatgacctataataagttaaattataaaatggatcttctgaattagggtgtacttggaaatctatttacacctttctaaacttaagttttcccacatctcggtacacaaatgtagaaggaaagggaaggatggattgactgttaaattcaactaaatatattttcaaacacgtacgtagtttagatttataaactcaaaattcactatttttaccaaattataacacaaccaaccacttaacaacatttaaaaatgtcaataccatctaattgtgtcttaagatgattttgtaaaattctttaaaaaaatacaaagaatgaaacatctctctctacacacatacataaatggtttatatatatatatatataatgtgtccatgggcacatgataaagaaccttaaatgccaatgtttataattattttaaaaagttttagcacaataactcctgtcagcttgtttcgaatgtataattatttctttgtatagctacttctttttggatgtcaaaccaaattactacttaataagaattaacattccttgaaaaagaggtgatccagttgtaccaactatattttgttacaattgtactttagataacaacttgtgttttaatacaataaacttttccttttaataaaaaatatatttaatttattttttatcatgtgtccacgtaaaaacactcattaatttttctttttctttaatttaatatggtcctacaaaaagttagaaccaataatatcatgcatactatccaattccttatcactcgttaaaaattgattctaaaatatgagtggagattggttcaagtgtgaagttgtgaatatgtgattatgccagctattgtatcctgcattttcaattacatttcgaaaagtttatttgggaataaaaatttgcaggtgcaggaaacaaatgttatgccttgctgactgtcagagagtgacaggccaagcccagacagcccgttttaactgggtcatggggaaatcagcccgattcaaattagcccagcccacgagggctaatccgggccgacccaaatgtcaggccccataccggaaaacaaaatttggacaaaataaaaaagaggagaggagaaacgaaccaaaaatggggaaccccttcgtttggaaggcacaaattatggttgcatgaacatggcaggtttcgcggcaaacatcggcttcaaaatcccgtcccactttccctgtcgcgttttttcaattcatcggtaacttctctctctcatttttagctctaaaccttctttggttactgaaacaaaatggcagaaaagcttgattcttgtgagagtaaatgagtaatggagttctagtttagctacccaattggaagcattctactgggttgaaggaagttcttcaatttctttctgtctctccacccacttacatataaatataagcttcagctttctatagattctgaaacattttgaccattgttctaattatttattttttaatttggtattaaaaaataggagtatttggaagtttcagattagcttgaagagaagagactatagttcttctgttcctgttaggtgcatttccagcacatcctgcagggtgaaaatacttgaaactgcactgccagtgaaaagcctgggatattgtagctgtcctgatgttaatgtgctcaagataaatggtggaaaagatgtgcatgcaacaattgcacattgtgaaatttctcaagacccgaatgaaatttgccctgacttattatttgatgacagtgaacaaggtaaacttctattttctatttaatatgatatggttttggttcatcatttggtagttagttgtgcttcgctatgcaggatgcaggggaactacgtcactactacctatagctaaatacaatagatttatttgtgattttaagcattctaattcaatttgatgcctgacatgggattgttgactcggatttaagtctggtgattcaatgttcttatattgtggtactggataaactcagcttgccataaaagtaataagagattgttcacacttttgaggatacattgtgatttgtgattgatggtctttgtaattgataaattgaataaaaataagcttcttacaaaaaaaaatgacgcttgttaagaaaataatgggaaagaaaggagaagcttatggttaactaaagttaattttctccaggttctaataggatcgatctccttctactattaagattggggatggataataggttcatgcttctagattcagtgatatacattgtgtgtttgttttcaccgattaaaaaatttacattcattatcttcttttaacctgtttttaactctttaaaacttgtggcttctttctatctttgttgtaatgggatattctgctgcggaaccaaacattatgattagaaatgaaacagcacttacaacttgtatatctaagaagtgaagttgttctgagcgttgtaatttgtgattgtaggttctttggatcaaatggaagaggttggagagttgacaatccatgagggaggagactcttgtgaccaggaattgatacaaattgacaaatttacaagggatgtcgaggaagctgctattaaattacttgcatctaggttaattgttgtctccccttccctcctcccagaaatagaatttattcagtgctagactagttataaactgtattgtcaatccaattgaagagtttctgaaccaaatatgggcgagcataatgcttgttcattttttaagtgcaacaaaaatcaatttttgccatgctattatgagtttgcagttaattgttgctgttttccctgttgaggaaacttcctttttaagttttactcagtgtgtcaagtatttaccttctttcaacacttccattaagaaattgaagaaaatgtcaagtacttcatctaagttgagtttggggagggtacatgcatgcatccttatctccttaagggaaggctgtttccaagatttgaacttgtgacctttaagtcacaaggcaaaaaccttactatagtgccaactgccaaggctcaacatgaaagctaaaagacaaatttaaaacatagtatgtgttactttggcattgtagtcactatctacttacaaatatcccatgtattttttttagaaatttcaacttgattgaagttgtttgtatatttttatattgaagaatgaggttatgccgaacgaagtgttatcttatttggcatgcctttagaaacatcttagcaaattgtcattaacaatgaatttctttgagttgagtttgcttataagttgttaactaagagaagaaattttgtaataattagtaaactaatatcttttcccttttggaaagaggagtgtgcatgtttaaatgtaaaaatgcagtcttttcttttaagcatgcttgtctctctgttccacagggcactcacagcacttgagttgagaaagaaattgcttggaaagagattctctgctgatgcagtggaggcagtgataaacaagttccagagaaggtatgtagttaactagataaaaactgtggagagctgttgtttattagccaattttaattgcttccttacttgaagctttacttgcttccagacaactacttcctaaatttggtttcctttaagttttttatccagttacaacaaattgagagcaatatatgttatgttatgtgatttctggccttaaaaatgagatgtctgcaattataaattgctatcacaaaggtgactttgaatgcagctctagccaactattaattcagtcatggggtctccatgagaaaaatggctagataactggatattgaggaagaatgaatgtcttgagaatttgagtggcccatctaatataatttgacatatggtcatttaccaatttaagtcttatgtagtatatatgcatagagttgtttagttttttatacagcacgtagatcaacacttattttttcattttaatttattttgtgtgtcagaaactgatgaactatttttccacctttttttcattgaagagcaaatggatataacatatttggattacagaaaacagggaaaaggaatcaagaaatttaaagtgtgtttggtatggcttgttttgcagaaatatcaaataatcattttttgggcttcctgaaagtgcttttgaaaccgaaaaagtttcacctattctatgtgtttggactaacttattttgtattcaaaacaacttataataaaaaggaaattatgtaagtttgctgatattgtagaatgaaaaggaaatgatctctgcttttaccttgacattataattttaccaggtcacttgtggtgaagggtgattacttgtcaacaatcaactcactgaaaattgttttttagtatcttagaataaagaagagtgaagatgaacattaagtgcggttgtaatgaagatatttattaacacaaatcatggagtttgttttgggaatcgaattttgttttttctttttccattttaggatgtagttgtttgactgtgagtaaagcttcaaataaaggatgcatttgaaaatggctgataaacaacagatctactgtttttatatgaagttaacatgttttctttttccatttaacttttcttgctttaggaaggatagagactctgaattttttaaaaagagagtatatcctatgattaattctatattaattcaaacactattattttatatatgcagataaagtaattctgttctattcagaataaactgtgtggtacatgcatctcaatttttttttaaaagtttgcatatacccatttatatcatgttaatttgatattgtgcagtctttttcaaaatatgcttttttaagttcatttataaactgagtttgcagacatttttatactttatgtttacttatggtgattggtttaaccttttttgtatcagagggttcatcaatgataggttgtacgctgaaacattttctcaatctagatggacttcatcaagttgggggccaaggcggatcaaacaagttaatcttctttgcattttttgtttgtcctattactttttgctttcttacatgttggctgttccattctgcttttttatcttcttgatcaatacttcttccccgtgttttgttattaatcccattgcagtgcagaagaggaaataattgtgttagcattatgcttatattgtgcttgctaaaattcatcatcattttaactctagaatatagaattaggaggaaaagatgacgtgcattgtgacagcatcttgctaattcagcagagcagtatgcattcactttttttccctttccacaattactcttttgggaacacaaatgtgaaaatctgaaaatatatacttgcatacgaggacaatgttaaaataataatatatcatttactaagtaattatctgtatctgaaaatttagcttgtgcatgtaatctatattttgatttttccctacatctaaaagcttttgaagtttaattatgtcttttgcctgcttgacttgtgtcataatttggcttatttttcatagcgaattgttcaacaaatgcaaagcttcgacccaattcttttctcttgtaatttatctgatcgaataatttcttctattacttggctacttgttgagggctctatttatttcattttaaaactatctgattatttttttcccaaatatgcaaaaattgcctagattgaattgaacctaatcccttcccctcctccagaaaaggtaaaaccgattgattgaaggcttgaatcttctctactcatcattttcctcgagtttagatgccccaaacacactatggatgcacaaaagcagtgtttgcttaaaggttctttactgttgttgtgggccatgcaaggccaaggcacagacctttcaccccacatgccttcagtgcccaatagccatatatacctgctatttcatccaagggagatacttttgtgtgatggattgcaatttttgtggcaggcactgttcaataagggagttagtcaagctgatgctgagaaggcagttgaagtggtctttaaggacaatgattgtgccgaagatcacaagtcagttattggcttgtcaaaatattccatggatcatctttatactcaggcctcaaagcagtggttcagaggtcagaatgtactcaaggagacaaggaaatcacgaattgttcggtggcttcagtaccgtggctttgactggaatgtcattaacttcatactaaagaaattagacaggcaggaccagaattctccatagtgcacaattgggacatccaacattcatatccatctggaaattcattggtgggctccatacatgtttcttgaaaatgtatagtgtgtaatatggtagggttgaagcctcctttggctcttaatgctgttgcaagaaaactaatagttcattgcttcaatttgctcaaggccatgtggcatttgaacacacaagactacacttgtctgggtacattgatgctacctttttttcttgttgaggctgagacagcagcaagcaccactaaggaggtgctacttgttgtgagtccactgtgtcaattcttgtagatatcgtgtgatatgatatgatctagaaacaattgatgcgtctgcttatcttaaatgtgtgcttacgctagaaaaattatcaacatgcctatccaataacagtcattcatcaactagcattcagaattctagagcagaatgagtgccattaatgatatgatataatggcatgtgttgaattatttgattatttcataaagcgtaggagacttaaagggctagttggatgcagacgtgcagttaccagaactcttcaatagcaccacagaattttatgtaattttttcgttttaaatatatcattttattttcacattgtttgtttggtttagctttttttgaaagagtgcttattaaaaataagcaattattccctctaaaaaataggtctctcaagtgtgcactaagtttttccttaaataaaatttgtgaaaaatgcgattattcttttttaaaatctggaacacatttatgaggaattgcatagaaaactatcgactttaagttttgcttataaaaaaatatttttaatacattatttattattaggttaaatttaatgtggactttactaattaatagtaaattcaagttatttattgagactcttataataagaaaaacagtattaaaaagagatattaattaatatttttgtagaaaattttcaactaaatatgttaattaaatgaatttaactagaacgtatgacaatgtaaatattttttatactgttaattaattatataattaaaaattagtaattttgttataattaccttattagtcacacataaaatattatctaatttattaataacataattttgttaacaataataatgtattaaaaataaaatataaccatattagtgttgcttgaaaaatattcatcttttttttaaaaagaaaacatattttacagaaaagtaaagaaaaaaagaataaactaaagggtagaatttagtttcctctagtcaaattagtacaaatacatggatgattacaaattagtacaaaataaatggatggattaaaaaaaatgttatatccttttacaatatttttatcaaaatttctaaaacttataaaaaatagttttaaatgaaaaagtaaatgcatttaatactttgaaaatataaaaaaaatatctaataaatgaaaatattattataaaaggatttaaatttgttcataatacaattttcagtgtttacagtcaaaaggaaaagcaggaaaatcatattctgatgagaagaaatgttactttatgacaaatccatgctctaattttcttttctgttcctcctattgttgaagacattcattagtataaaataattgaaatcttcttgcaacttcattttaatttactttattttttgtggatattttaatgtacttaaatcgttattctcgtactcattcttttcacatataatgcaatgccacaaactctgctcctcaattatttccagtcctcttcgtactcttccaagaaatgccagaaagttgttcacgaaagaatcttataagatataactgaataagctttttggtcagttcagagaattttgtgaaccttgcaaatgataaaaaaaattcccttgttcgtatttgcaatctgcatatgctgctggactaactggtctatctgttttacatgttacctttcacatttccagaataataatggtcctgcatgtacatgtgcgtgtgattaagatacacagactttcattcattccaaacttaatatgtgcttctgaaggagtttccaattgttgcaaatgcaaagtctctttcagagagcacatgggacatgtgaggtattgaacgtgggaccatgtggaattgaaaggctgacttgagtatgcgtgcgtgcgtgtgaataagtgaaagagaaagagagagagagagagagagagagagagagagagatgcagcctaagaatcttattttctgtgtaatatccaaaaaaattccaatcattgtaattaatatcacttgttgacagattatttggataaacttaccttagaaaaaaataagaaggtgaaatgaattaaacttgtccaataagttaaaatcaacttatgtgctccagtttttagaaaagttagatgagagaagttcaattttttttttcctcttttaagtacttatgtagaagtttattaaaaatggacttttaagtctactgtgtttattagaaatgccccagttggcagtaatatctgagaagtttcagcacttgtagaccaggaaattattatcattttccatgttagttaattcaccacaaagactaaaatcagaacatcaaaatttgaattcaggtaaaagcacaaaggttacaaagatatcaataatgccaaggtgacttttacatcggattgaggaaccacctagcctgaaacttaattaatttgttgggtgaaaggctctagtctctagattctagaatttttttttattattattatttaaattgaatacatggattcttgaaatatgcattacatatcttggattaaatttgaacatctctagtaattcttctggccagctctaactgacattccatttgtatgcacatgttatgaatcatacgttctctatgagttgcatgcttgctcaacagattgagtcctctgagaaattaaaggaacaattagaagttccatgtgaaacacctttcataggaggtgctggagaagtatgcactgttaaaactccctttaatacatcaggacctgtggttgaggcctcaaaaggtcgaatttccttgagcattgcaacagtgtccttcattgttggacggtcctcggctcggttgctgacacatagaaatgacacggctagagtttgtagcatttcatgcacagtagaaacagttctccctctcagctttgggtcaagaatgtcataagggtctcctttgctagctaagtggttcctaacccactgaaccaagtgcgcacccccaagaagtgttgggtctagggggtgtcttcctgtcaggacctcaagtaggaccacaccaaaactgtacacatcactcttctcagtgatccgttgcatagatgcaatttctgtacatataccaaaacaacaaaaaattagtactatttcaaggggttatgcaagtaccgaaaaataactaattcaaacatagcgtgaaaaaagtacctggagccatgtatccataggagccagcaaggtagggtctttgaactggcttggaattagtataatcaccattttcacttgcaattcttgctaggccaaagtcagcaaggtaaggctgatagccaggacctaacaaaacattcatggctttgacatctccatgcaatatggaaggcacacaatcatggtgcaaatatgcaagtgcatgagccactcccaacataacatcatatctggtctcccattctggttttccctttcctgaaccatgaattaatgagctcaggcttccattagggagatactcataaaacagaagcttcatgttcttgctggacccccaacccagaagcttgatgatgttcttgtgcctaattgaacctagtgcttgaatttcagaagtaaatgctcctgactctgctgatgaccacatctttttaactgctagtatttggccatttggaactgtgaccttgtagacaactccagcgcttccggtgccaatcacattggatgatgtcaagttccggacaatgtcatcaatagagaactcaaacttctgatacaaagttatcagccaattgttgtttccattgagtgctttgttagcaacatgagcacggatcaagacatggatcgtgagaagtactagtactgcactggtgcataagagagtggacattataatctccatagccaatctggcatgacccttggcctcctttctgtcagctggagttgcaacaccaccaacaatgtagagaccatcatttcctgtgagatcgttgagagggagtttccggaagaatggtgtgttaggcaattctccagagaaatcattgaaggaaacattcagtgaaacaaggttgtgaaggtcaaagagagcatccaagttccctgagagcttgttgtgggagaggtcaagcactccaagttttctaagacttgagaactgagttgggatttcaccagaaaactggttacaactaaggttgagaaagatttctagtgaaggaatttgagcaacttccttgggaatttctccagagaaactattgcttcccaagtccagaagttgtaacttggagcaatataggatctctgctgggatgcttccactgagttgattctttcccaagttgagtttggttaattcagttaatgaaccaatggaatgactcagttcacctgttagcctgttgtctgagaggtcagttaactgcaggtttttgggcagattgtctggaattgagccactgagactatttgaatggaggtccagaaactcaaggttttgacatctggataatgttgaaggaatctcccctacaagatgattgctgctcacatccaaaaagttcaatttcttcaagttggtgatctcagatggaatggtacctgccaatctattgtgatttagcctcagcctgtagaggcttgtgcagttacctatctcaggtggtataaagcctgacaaatcattggaaagaagcagcagtttagtgaggttccttagcccaaaaagttgtttgggtattggaccagttaaattgttgtaagagaggtcaagtgcctgaagatcttggcactgggaaagactatctgggatttttcctgtgagcttgttctgccatgcaaagaagagagtcaagcttctcaagttgccaataagaggaggaacctccccagaaatagcattgttgtcaacttccagttgattcagggaagtgcaatttgtgatttcaggaggtataatgcctgaaagcttattaacactcagttgaagcccttgcagatttgatagcttaccaaaactggttggtatgctacctgtgagaagattttctgacaaatctatgacttcaagccgtgtgcagcttccaagctcttttgggattgtacctactatattgttttgccacaagagaagattctgaagcttgctgagctctccaatttgacttgggattgaaccagagattgagttctgatacaagtacaagttctgcaactcactgcacttccctatctcttctgggatagggcctgacagcagagttgtgtaaatggctatggtctgaatttttttcagcatccctattgaagaaggaagactcccagaaatgctggtttctgcaagtcctaacaccaacaagttggtgcagtttccaatgtcccatggcacctcacccttaaggtttgtgttccctcctactctcaacacttggagctcagttaaggagccaatactctttggaatttcaccactcagtttgttgtcatagagtgtcaagttcacaagacttgataaatttcctatgttggatgggatgttgccttcaagaaagttggcatgcagagctaaagtctgcagtttgctcagcctgcaaatttcctctgggatttcacctaagagagaattgccactgagatcaatgacaatgagctccttatagtctccaatttcctttggaaccatgcctgtgatgttggttgttgagaggacaagagtcttcaaggacctgagaggttgaaaatttgaaggtagtgaaccttgcaagttcactgacttcaggtttatctcaaccacctctccttgtaagttgcagtgcaccccaaaccaattgcatggacttgggttggaaggattccaagatgctagtgcatctgaagtactgtttaaactgttcttccatgctaatagagcttggccttgctcattaagggagtaacagcatggaaacaaaagagagtttaataagagaagcaaggtgagggagaagattttgggaggaagtgacagatttcttaagatgacaggcattgctgtgaaagaagagaagtggtgatctgttttgggattgtagagggggaaattctatgaattttttttatagaggaagagaagaagctctggtcagaagagctagcttccttgttcttttattgtgtaataagctcctgttcaatgacaaggacatctccatacccatgatgatgtttgttggtttttattaagctaaacttctctttttatttatttatttcaagatgaacctagggtatctctagacgagagtcaaagactaatctctcaatatattgaaatctatctaagagtctgaccttttccaatatatgttatttcttacacaaactctggggatccaacttatgaccatatatttaaggagcatagttatccgtcaatcatactacactatcttggtaaactcctcttttttattggtttgttgtggttaacgtgtcaagtagtgagttgaaatttttagaaatttgcgatctaaatgtaattcaatttgttagttcctgttagatagtgtttcattaatagtgaactgtgagacatgaaactggttgagggtgaaaataatgtaaagaagattttgcatttttgttccccacgtggacacatattttatattgtttcctgctttaatttggtaataataattacttttcatcttcatgtatttaatcagctgttgagattaattagcagcaagcaacggaaaatgactttagcacttttttgaaattggttattaatgtaattatcttaccttgctctagatagtgatggatgattaatcaaacagaatagacagtttgatggttgagtgtaatagctctctgttcggttaatcaaggagataatttcttcctttaattagctaggcccattttgtggtccatcgcttttgtgtggctgtagtttttgatgagccactgatgtggtggttgctgcatgctaccctttgaatttctgaactttaagcaactaacttgcatatttggatcaaattaccaagagtgcaacgaaaggatttggttccattgtcaaaatctaaattgggtatccatgattggtgtcaagtttactcaaattactgagatattcgtggtgattaattttataggagcaaaatggacataatttagttcacaaatagtaataagacacatttcggtttgtttatatatacttaaatgaaggagtgcgtgaggaatctgatggagaagtgaagtgcacatggaagcaagggaatacatgaagaacgatattataatatgtgcatgatctgttcataagtatttgttggtctttgctttaaagaaataaaaagaaaaccatgaaaggtatgttgaccaagagtggaaggtacaaatttacagtagattgaactattgaattggaattattcgcaaatcaaagctagataactagcaaaaaaaatgtccatttaaatacataaatctaccttcttaatttgcaccaaagtggtcatcacgtgtcacggtttaaaactagaaaatactgagattaaaaaaaaaaaacgttcttgtttttatgtgttgacagaattacaggtacagaagctacctgttccataattgccatgtacttgaagatgccttctggaagtaaaaggtattttcaacaccattttgtgcttttggggtgaagcatgtgcatgtgtagtgtagataactaccaacaatttataacatatttttaatataaaaaagagaactatacattcaataccaataaacagatagttagttaatttgtacagtaccgtgacaagtttagctatagaggtagtttagattgatttgattcaatgaaaggagaaaaaaaaaaagtttagattgatgggacatggcaaaataaacaggattatgattaccttatagaaatgaaagtaattaaggcttgtacgtttaatgcgacaaaggaaaagaaaaacaaaaagaaattctattgtagtgtcttcgggagtagaactcaaatgatgcaactcttctttaaacaaacaaaaattggaagccaagataatcaacgatccctaatccagtatatatcttattcaccatagttagagaacaaaacttaaaagaaagaatttaattaaagtgtatatatatatatatattaactttgtaaagatatttattctggcatttaatcatgaataatcatatatcttattaaattttataatgatagtttaaataaacatagttaaaattatttttaattgacaagagtttaattttcataaattgtcagtgtaattcttttactatcgagatcagtcaattagaatttattatcaatataaattttaaaataattattataaattaataatatttacatacatgacaatttataattaaattataatataaaaatatatactaccaatatatttaaattaaattcgaatccttatggttaggcacatgcatattcaaatttgaacatttcaaatatcttgagagaacataaaattattttggatcccttactctcaatttaaacatcatgttatcctaaaataagtttgtctataaaatctataaaaaaataatatgctgtaaatgaataatatatatatatatatatatatatatatatatataatatgctgtttctactctctagacacatttacagctatatcaaccttttccagacacacaactttagggtaccgctttccccacctatcatataaatgaatcttgaagatgactgaagatccttatgccttatctaatttgaacttttatgactctgttctgtgcattatgaatctagcaattgcatgatactatcaaaattaatctttgccaattgtcccatctaccatctccttcattttgctgataatagatcgatggggaagtttcagctacacccactaatacatcatgaatcatcaaatcgaaactgtagacttaggacaagttttatttatgatatgcattcgtgtaatgtgtaattgacagctttggattcattgaattcaatagctttaatttaacggtttagaaccaaatagctgcttagatataggcttatagtccacattaatttgaccctaaacttaatcttttactaatttagagatggttgtgcataaaataatggaatttcaaagtaagcatattaatttattatgatgtatgatgacagaagatttatagaaaagaaaataaaagaaaaagtaatatttcatggtaaaggggagatcaacgaggcaaaagagggtgaataaagggaccccaatgacattaaaaagaagagacaaaaggcaccatgtatacatggatggaaattaattcttgcattagtatgaaacgatccatcctctaaccccaccattttattaattgtcggctttaaatctctttgtaaaaaagtagtcataaaggtatatatccaaccccaaaagaaaaagagagcaagtcataaaaggcttcccctgggggcatcttatgaacaatcaagtttacattacacatatggcatgatgtcatttttcacccaatagcaatgaaaaacaagaaggcccttttggatcacttggtaatcccatgcaagatgaattcagtaaatgaaaaagaaagattagacaataagaaaaaaaatgtgatgatgatttccacttccaccataaatttcttcatctctaacagagaaaatcataaataaccacagataaataattagctcctcttgaaaaatgtaattacgcaacacttctagctagcactcccatttacaccaagttatataattgttgattcctctatgtgattctgtcttaattaattaacatatcttataacccatttttaatttttctttcatgcttgcttgttaaattcaagaatttttttttttttaaaataaatactaattttcttttcgtttttcactgccccccatccacacacgcacacaccttcccttcttccttctgagtatttgaattccattatctatgtgactcataccacgacggttttcgacaaacatgaacgaaaattattgtttgtgtatatgaagaatcgtattttttaatctaaatcacattcctgctgttgtatatcgtactacatggatccaccaacatttgattaaaaaaaaacatgaggaacaagtcataagctaatcctcacaaagaaaatagccaggcacatgacatgaaacaaaacattgctggattttctatatatggcaataattaaaaatctaacctatacatgctgctgaggctgtcataatgtggtgcaccttatgtttagattgaagcattgcttatcaacttattatgatattcctgtccattaagattataatacccccccccccccaaaaaaaaaagctccctggttctccaatatttgtttattaaaagtgagtgtcaggcctcggctagctttttgttactttgggaaaacaaattaattgcataaggaaaagagagttgtaattatttgtaagataggtagcttctctttagtgataggttgttagctaggtaggagctcatgcatgctcatgagaggagaatatcgatcaataatctatttgaacaacatcagtggaaaattcaaatttgaccaacaatagagtggccacaaattataaatgtagtacgagtgtctaaacattattattagagcagcgcattagtattgcctatgaacacattatcaccactccattcgattacaatatgagccttctgtccatgcatgttcttattgtattgtcggaagccattttatcactgatatagccgcaacttctactactagtgctggaagatgggccattgatgtgtatgaaagaagctggccattatagagcatggtaattccacccatattattaaattaaagcttaatatgatatcacttacaagattgatagataataatttgaatcaatttatatgaaattattttaatttaataagggatatcaagtttaaatattaagtatctaattatattaaatatggtgaaggagaattttgttatttatattagtcttatttaatttgaagattgttttattacataaaaaagacatgtaatctctaagccgatttttatcaaattaatgattagtgatctgcacattaaattaagctctctctctttttttgtttatttatttatttttgttgttttgcctacctagtcaacattagctctttagcaatcatacaagcaagtgtaatcatacaataaaaacagaatggcttccccgtgccccaaattctggaaatatgagaagaatagagagagaaagatagcgagagattttatgatttgcattgaggtggaccctttgagaggtctaccagtatagcatcataggaacttttgtccttaatgcatggcacacgtgcaatagagtcagcaagtggtgaattcgatgcacatcaagtggacttttgaatccccaataataacacggattgatcgaaccaagcatgatttgttagtgacataataatgaaatcccatcaccataatattaattaattaataagccatatatagggtccatgggcatcaaaaatcatgtaagaagaattgccaagttacacttcccgaattcacacgtttgggaggctccatccctgatcaatatcacaaatcctttactgtttagaaaacaattgaaatctttgtttctttctaattatttggccaattcctccaatttgtgattgtttcccgaaatcatagagataagaccatataggtcgacatcctaagcaatttgtctataattgagatttatcacctaccgcattagcaaattaattcaatgtgaagggagcttagagaccattgccacccaatgagtgaatgcttaaagtcatatatggatccattaattttaattgtttttctctagatcttcactatactaatttttaaacctttcaaagtgctccactgagttttggcttgtttttcctccatgaagattccattattaaaaagactttgccatatccccgaacatagccttatagcttgcccatatatacatataatctttcttgcttgctttctttctttttttgatatattatacagaatatagtatttctaactccaataaaaaaataaatgatattaacctgctaatggattatatagtttggtgatacatatttacttgagttgtgctatttcgtgccaatagtttggtatgaaagaacgaatttgttactaatcaccaaataagaaaatatacacaaaatgacgaataaatgcacaggaaagtaaataattaacatcacgtcattttatattatctgtgcgaatagatagatttcttctcggttaaaagaaaaatatggtcttcaatttcagtctcattccaaagagtcagtttcactctacatattgttagcttgaaaaaacttcgtctttgataaaagatagtggtcctaaagaaaatcacattaaatcaagtgactgtttgatcatatcataattcatagctgtctaaatatatccgtaagttctggtttctgttcctaaatcactttccaaatgctataaattattatatgtaatgtgtgcatggaaagttagaatataataatatcatcctttacatatatgaacccagtactttgaacgtgtcctatcaactccacccacgagtcatgaatggtaagcccaggaattttgctgttagtactttgcaattaaataaactggctagctttgggtcttctggaggttagtggctttttttttttcttaaccattttttaaaaaataattatatttatattactgtgtttgaatttatttattttgaaaaataatattttttattttaaaaaaactattatttttctaaaaaaatcctcctgctgcatgtcagtcgtcaagattagtatgagcaagacatgcagggacatttatttgtcataactttgtttgaccgttaaaaatacaaaaaaaaaaagtaaaataaaaagagataaataaaataatagtttgtttggataaatagaaatgataaacgataaattaaaaaaattattttaacttatttagatcagaacatttttatccagcataaaaaaaaaagatcataaattttttatccttaggtaaaaaaaaaaaaaatggaaaaaatagagcatgttaaatgagaaatgacctaactattattttgtggatcttacgtaaagaaatctctccttatggtgtggagagaaattttctataaacctcacattggaaaaaaaaaaaaaaaaaaaaaaaaaactcctttcttacaaataattacaactcatgcacgtaaagtatgcacggaaaaaactcctttcttacaaattttctataccaattgagtaaaattacatattttatattaaaaaatatcttcttcttcttttcaaattctagttatgttgtacaataaatatattacgtaaagtataagtaaatatctataaaattatacgcccatgccagttaatgcgtaaatatcttatctattacgtactataatatttttgtgtggaaactcattgattttaagatcatctctcttcgttagagttcacaattaaactgcactcatcatccaatggtaaattagcttgcaatttgcaaaacaagttttcatattttattttagtagaaaaagaaacattttcaagggttgcaatgcatctttacagtgaaaaatttagcttgatcggatcatcttgttcacattaattatcttatatactttaatcatggcctatggtcgataaactagttctattcactgtttccattcatcattacaaagcgacctccttgccatcaagataactacaagtcatttttaagataacagtagttagaatcaatattgtggcgtccactgaaacataattaagagcgttgtctcgctaacttgttcaaagattcgtatgcgattcaaaaaataaaacaaagtcatgcagtattaattaattataaaccacgaaccagaataatttaacctataggtaatgtgttatcaaacaaaagtgggaccattacgtgcctaaagttttggtggtcttgaacctatagatttcaatccctataaaactaaaaataactatagagtttttggaaccattatatgtgcccataattttgattatatatattacattttagtggaagatatatacaatgtaatgatctccactatacaataatttcccctttgaaacaagtatttcactttaattaagaagataaaaaaaattaaggacttacataattacatccattaattgttcatattggttaaggtccacataaccttatatatatataatctgtcatatatatgtttttaaccaaaatctcaaccgtttagttatttatttatttatcaatcctcatagatcttcccttttatctctgacatacatgaatccttcacttaaatctaataaataaataaaaagaagccaaagctattttacattccattttggagatgggagggagccagggaacaaccggaagaaagcaacagatttccgtagcccatcaattagataatgttgactagaaaagaagaaagtgttaacttgcgattagaaagtacgatgcatgaatactactatttgtcatggtactcctaaatacttgtacctgtactaggcactattccgtaccacgataccagcatttatttataatgtatatataattagttacatataacattatgaaaaattgtatatatattgtgattgcgattttatactccatcattatatgttcttattttttttacatgaaatatatcttctcatgcacgtatcttaatatgtcttgtcaattttgtggaaccattaattgtacccgaagctgtaccaatggacttgtgttgtgttcctatatccatgcaacacgaatgaatttgttgtgcagatcgatctaggcggcaacaaacagtgaaatcataggaagagttggatgatcagcaatgttcatgttcatgggtcacttccaagtttcagctgacaattcacttgtttggacggaagaacatctttatgcatgggatttttgaatttaaaaatcttcccaaaaactattcccattttaaaaatatatatttttatgtctctatccccaattaattaataaaatatatttaagtggagtttattgtgagatccttaaaagtgactcaagaatccaaaatgtgatttatcttaaagtaaaaaagaaaaaattacttgcatcttgtatgacaccataaaactcacaaaaaattgtccaagaacctaaaattgaatctaccacgcactataagggtagattagaaatctcattccagcagatctgctagttcaaaagcctattgtaggtttcaagaataaactggtattattttagtttctgaacaaatgtatcgtaatactgttatataattactccttgaattctcacgcatcctcttcgcgctagttgggttaggactgaggagagtgaaaaatttttttttttttgttgacatatttgggcttaggtgcttttcggcccaaatcaaagtgaaaggggaaacacacttatttgggcttcaacgactcatccttcactctcccaatctaagtattaaccaaaatacttaattaaatctaacactagcatttaattgtctatacaataaaataaatcctaaataattatttaaacgcattttaatacttaaaattccatttttttaccatacacacaaattcttaatttacttaaatttataataattttctaaactaattgataggattctttttaattattttaagtcaaaaatataaatacataacaattatcaaagcatcaatagtaaaaaataaaataacaatttatttaatatttaaaaatacacgaaattagggaaaagaggatgccatacacatcacatatgataagagacaatatatatatatatatatatatatattactattcattatttttaagtttgataagaaaaagggtaaacttttagttcaaagtaaattgcatgtatttttcatttattccatgccaagtttaacctaagctttgataatatgaaaagatatcattcaatcatatagttaaaagacaaaaaaagagaagtgtaaatattaatgatctccacaaacacacacgtaacaatttattataatgttatatggagcacttgttaacactttgtcaagtgtaccaatttgtccaaataataattagacggtaagtccgaatgtcgatttcacatgacctttgtttgtactcagagttaatacacgttcgtttctaaacaattaattaatcaatttggttctttagagtaaatgacatataattaaacttgacctactaaactatgaagcagtgtaaatacaaataacaaagacacaaacactcagagtattgcagtgatggttgaaatacgatgcgatgtatgttgggagcttaactaatcgaaactaactttgatgcaatattaaagatttttcgctattcaatattattttccaatcaccttcatctactaatatattctagccatgattcctcaagtgcaagaccctaaatcacttaattttgctcttaatcccttaagagttgcattaaccaacttgcattaagattaaagataaacaacttaggctaaacaaaaccattctatccctagaaatggtacatttagaagtgtttttcaattataagaaaataacaattttccaatgtattaaaacctattacaatacatgaaaatgcatgatcaaaccactaacatgataataactcagaaaacaataataatgcgaaaatgacattgaatagataattagaatcattatatttggttgttgagctcccaacaatgggattctagcctcttattttcatatgagacttatacaaatggagggttaaggcaagggaaatggagtggatggagggaaatgaggaacataatgatgaatgacagctccaatggtgtggaatgatgtctccttcgtgacctaagtgcttgttttctgtctgtccaagtgttccaagataatcccctctttttccctcatatttttccttaaaacgcaacttagtgtcgtggtcacgcgcctagcgggacatatcgtgttaagcgtgcctttagtgtccagctggataaatgaccacgcgctaagcgaactagttgcgctgagtggatctctgcgcattgagcgagtagaccctcaattctccttccttgtccttgcagtgaatttttacaaaaaaatacaatcaacaccttatagtcaacaaaatttagcatctactggataaaagctcataaaatgactaattcctaagttttaatcgcaaaaagaagcattaaaaagagaaaaaaaaagagataattgttatgtaatttacatgtaactttgctatgcatagcaattatcaacactccatattagttgggaaagaatgagaaaaaagtgtaaaatataataggtggtgtgcatacttcttacttttatatttccttcactatctttagggtaatcacaatcaaattgattttgcaaaattattttttttaagtaaagtgatttatttatgattatagttttatttaaaatttaaagtaatagtaaaaattggtataattttttttcatctaatgtaaacctacctaaacatgctttaactcaaaatccattatgtgctcataaataatttttcaacatgataccaaacattggaacatttattttaaatcactaaaatccaacactttataaatgtgtgtttgattttatgttgaattgtctaaaatcatgttaaaatatcaactaatgttattttagataatcgttcacatattgaagaattgattatgtacacaaattgagttttaatttttatagacaacttttttattggataagaaaattttatttatttttaattataatttaaatcaattttataaatttaatttcactgataatcaattaaatgatcataaagcacaaaattaaattaaatcaatttaaaatgaaaagtacaataaggtccaacattattgattctttaaatatattggaagagatttaatattaatttttagtctccttaattttgtacttacattaatcaaaatttaaaaaaacacaaacttacaagaaaaaaaaacttacataaacctaaattgaaaaagtacaaactcacataagtttaaaaaaataaaaaaattatataaatcaaaattaaaaaatcataaaaaaaaaacttagagaaaccaaaaatatatcgtgatcctaactcttattttatatcttacctaatttaaaccatctttatatcatatattgctcacactatcttatttctcctatttatagagatacgttattgtaaggacaacaaactattattttttattttttattgtgatccttggtaagaattgcatgaattaggattactaaatctgtaattattagatttagatatatttaatattcatctgtaaacaaatttattaaatttcatcaagatcatttgatatatatttatttctattatatatgatatgaataatttgtaatctatcaaatctaatctaatggctgaaaacgaactaaaccaagtccacggcaaaacggtgatgcaagacgattagttggagcgtagaaggatctagaagacataaaaccctagccaacacttgctatataacttgccactttcttccattttctctaagcactccttccttttcgttctgttctagcatcttcgctgcaactctctaccttccctctttttccgaatttgaaacgaaatggcctcggagactgagacgttcgcttttcaggccgagatcaaccagctcctcagtctaatcatcaacaccttctacagcaacaaggagatctttcttcgtgagctcatcagcaatgcctctgacgtaagatttttatcgatccttgttaggtttttctatttccgtttgttgattacgtcctttactgcgctcgttctttattttcatgtttattgctcaaacacatgcagggtttgttggacatgtctttttccccccttttatttttttgtgatttctcttgcgtgcgtttacctgttgttgtcttcatagttcaacaattgatgtgtttttttttttttttttttaatttgttagggttcatgttatgatattgtgctctttccattgttaaacggtgctgattattctctttattatcttaaatagcataattgaaatttattgagtttcgggtacataatttttgtccctgttcctgttgtctctgttatgtgagatttacgtagtactatgccgtttttttttactgcaaccattggatcttgattgaggcaaaactgatgctgttaatacgttcttctatttggggagtgagtggatcgtttggatttggtgtgaattatgctttatttaggttttctcttattctacactttgggccttatatctgattgctgacatgttattacctttacaacaatgtaggccttggacaagattcgatttgagagtcttactgacaagagcaagcttgatgctcagccagagttgttcattcacattattcctgacaagaccaacaacacattgtctatcattgacagtggtattggcatgactaaggctggtaagattaaatattttgttagtctttgtgagattatcgcggactgtgcatgttagttagtctgttttctctaatgcatgtgcgttttatgttccagatttggtgaacaaccttggtactattgcaaggtccgggaccaaggaattcatggaagccctggctgctggtgctgatgtgagcatgattgggcagttcggtgttggtttctactcggcttatcttgtagctgataaggttattgttaccacaaagcacaatgatgatgaacagtatgtctgggagtcacatgccggtggctcatttactgtgacaagagatacatctggtgagaaccttggtaggggaacaaagatgactttgtttcttaaggaagatcaacttgagtatcttgaggaacgccgtctgaaggatttgataaagaagcattctgaattcattagctatcctatttctctctggattgagaagactactgaaaaggagatttctgatgatgaggatgaggaagagaagaaggatgaggagggtaaagttgaagatgtggatgaagataaggagaaggaggagaagaaaaagaagaccattaaggaggtatctcacgagtggtcattggtgaacaagcagaagcctatttggatgaggaaacctgaagagattacaaaagaagaatatgctgctttctacaagagtcttaccaatgattgggaagagcatttggctgttaagcacttttctgttgagggtcagctggagtttaaggctgtcctctttattcccaagagagcaccttttgatctctttgacactaagaagaagcctaacaacatcaaattgtatgtccgccgtgtcttcatcatggacaactgtgaggagttgatgcctgaatatcttagctttgttaagggtattgtggattctgaggatcttcctctcaacatttctagagaaatgctgcagcaaaacaagatcctgaaagtcatcaggaagaacttggtcaagaagtgcgttgagatgttctttgaaattgctgagaacaaggaggactataacaagttttatgaagccttctctaagaacctaaaacttggtattcatgaggattctcagaacaagacaaagctagctgaattgctcaggtatcactccactaagagtggtgatgagatgaccagcctcaaggactatgttaccaggatgaaggaaggacagaatgacatctactacattactggggaaagcaagaaagctgttgagaattcccccttccttgaaaagcttaagaagaaggggtacgaggttctctacatggttgatgctattgatgagtatgctgttggtcagcttaaggaatttgagggaaagaagttggtctctgctaccaaggaaggactgaaacttgacgagagtgaagacgagaagaaaaagaaggaagaactaaaggataaatttgagggtctttgccatgtgatcaaggatgtgttgggtgacaaggtggagaaagttgtggtgtctgatcgtgttgtggattctccttgctgtctggtgacaggtgaatatgggtggacagccaacatggaaaggattatgaaagcacaggcattgagggacagcagcatggctggatacatgtcgagcaagaagacgatggagattaaccctgagaaccccatcatggaggagctgaggaagcgagcagatgctgataagaatgacaaatctgtgaaggatctcgtgctcttgctctttgagactgctcttctaacttctgggttcagccttgatgatcccaacactttcggtaacaggattcacaggatgctgaagcttggactgagtattgatgaagatgctggtgaagcagatgctgacatgatgcctcctctggaggacgctgatgccgatgctgagggtagcaagatggaagaagttgattaaatctgacttaattgcctgttttgtttttagaaagaaacaatgattggagaaacagtcttttaatatgttttatgttttttgaattttcgaaattttggaatgttggctagtttggtgccgttttctggattagtagtgtatgtagtttctttatggtaaatttgtgtccgctctctggccaatgaatttgtgctttcttcggataaacgtgtatgctgattgcggaagtttcagttcgggaatgaaaatgtttttacttctgagtgaaattaatcgctttgacgtggggataagaggattggtcaaatgacacaattatgagtttaaaaatgtcattcctaattaactgtttatgatttttttgaacgtttaaatatttgtttttgtttttgtttttgtaattttttttaatccttatttacaatttttttccttaaacatattagataacattttttttctgtttaaaatattttttattatttatagagttatctaaaatattttaaaataaataaatatattttataaagactaatgaaaaaaaattatagaaataaaaattaaaagtgttaaattacagaaaaaaaaatttaaacctaaattgaaaacaatgttgttgaaaatttttgcatttttaattactttaccttttaattattttctaaacttactatttgttctctcaaactcatttaaaagataaaagaaattatagacagataagtgcacctttatgttaaatatgtaaggacctttatatccattgccactttcttttttatattaaaatttaaacaatgtctgaatatttacatttttgaaaaatagcattactccttgttataattcattctcagaacatttttgcgttttttaggaataattttattttataaatatttattttgctttgaaaagtaataatccgttaatttggcaaaaaacaggtagtaatccgtatgcacctataatcttatatatagggactttcaagaatgaagattggctgcttaacttctagcataccctcacggaaggtaaaagaatgcgctgatgtcttctatgtatatattctatctatataataaaatataataaaagaaggaaggggcctgatcagtttgaaaattgctaattacacctcttttttgataagtttctcaggaaaaaattgaaacttgctaaatgataagtctcgcaatcctaactgataagtctcgcaaccctaactgataagtctcgcaaccctaactaataaaagaaggaaggggcctgacacccccatcagtttgaaaattgctaattacacctcttttttgataagtttctcaggaaaaaattgaaacttgctaaatgataagtctcgcaatcctaactgataagtctcgcaaccctaactaataagtctctcagcaaaaaaaaattgaaacttgctaattgcacctcctttttgataaatccctctattaaattttgatacttgctaattgcacctcctttttgataagtatactccaatatttccttttaaattttaaatgcctattatgtcttttctttcatctctctcacacattctctctttaaagtgtaggcagtgatattacctatgtacgcagggtatcgtactaactagttgcaaaactacaaaatttcaatattattttcatctttccttatggagagactctaaaccactggtgatatagtaattgtttgttggtgcatattgcagggtatcgtactagccagttgcaaatttacaagattccaatattattttcatcattccttttagagagactcaaaatcaccgatgatatagtaattatttgttggtgcatcttgcattccttcactactacatcgataccgttggtaagtatgttttctcatccttttggtcattttcacctttcttattgttacatgtatttcatatttgtttttaattttcctcatttttgtttaatggatttcttgatatttttcatttgagaaatcaaaaggattttgtccaacaagaagtcgtgggtatgtgttgattctcatccatcttttttttatcattttcacttttgtgattctaatgtcaaatttacaggcatttgatgcatctttcatctctctcacaccttttttatgttacatatatttcatatttgtttttaatttccctcatttttgcttaatggatttcttgatgtttttcatttgagaaatcaaaagggttttgttcaacaacaaaaagtcgtggatatgtgttgattctcatccatcttttttttcttttcattttcacttttgtgattctaatgtcaaagtttcttggtgtttttaattttaacattagtaagtagtcatggcctcgtgggtaagtgcagttgttgtctttcattttatattatgatttctacaatctcctcctttgagtccttcatcttttgttatatatatatatatatatatatatatattttttttttttttattgaaggtttttttttattattttatttcagaagttagaagctctatgaactaattaaacacctattgttacttactatcattctttctcaatgttgttggttcttacctcaattagttgagtctaattattgatagatttacaaaggtgtgacaagagatgaagccttaagtggatcaatggcttaaggtctgatttcaagagaggtatattatcacaagaaaaaaaatcattatttaacttcatttcttttttttttcctcttatttttgctacacatccattttgtcattaataaactatgctagatcttgcattttttaaatatgtttccagtctagatggtatattgttttaactacatttttaagagttatgtgtgttcaaatatcttctttgagaaatatgacttcagctctatgcataatcaaaaaatggtaaaaaaaatattgataataatgtatgttatattattcctttttgtattttttctattctatattttattttattctttaacatatttaatattaaataatttatgttcactaaaataataacatttagttaatatatattataaaataataatttgattctttgttatataacggtcaaagttaattaatttaaattattttattaaaaatatcataaattaaaatacttttagttaatattaaatatcttttaggcatccattttcttattttttttaaaatagacaacatttattagtttttgtttttatttattaagttctaaaaagttacaaatgaatatatatacaattatattatatatttaacggatacaattaagtatatataattatattatacattagattttatgacttaagagtatgtccacacgaatactttactagttagctaaacgtggagcgtcttcgtctcaacatgttccagttttggagcagtctttctgatgttcaaatgcttctcttggcagatgctttactgtatgtttatattctgctagtttggttgcctattttattatgcggaatgattaaaaaaaaagatgacataatatttttattattattatttataaaaatccataaaatttaacagttaacatattatataaaataaattaatataattaataattgattattgaactctttttaagaagtttttcttaggccccaataattttagacaaggccatgccatgatctccgtatccaactttccaataggaaaaaataaataaaagtggttaatatattaaaaataatgtcaaattatttgtacagtatcagagtttaatccttgattaaaatacttattttttattgaatttcagattagtcaaaatctcttttagactaattgaacgttaaagacaaaaaaataataataaagtttggcagagtaaaagagataaatcaagtaaaaacttatcccacaaaaaaattaattataataatatttttgttattaaaaaacttattttactacacgtaagttagttaacatgagagttctttccattgaaactttgcaatattcacaacatattcaagcacagaagccaggcaaggctagtattgagatttgagtgagtggttagagctcattgcagagagattggagccaacagagctggcatggctcattcctgaacggtggtgccggcacctgaaggatccaacatgtgtggtgggtgagcatagacaattcctcctttcactcgaagacttcttcaatgcagatgcagcttgaggtgttggtgacacagacacaaccatatttgactgcttattgatataatccatattcaaaccaggtatttttatttctttaccattcagcttcattagattcatgcaaggggactttttctccatatttccctccatccctttcctgaccacgcatattcaattaagaattaaccatctaacatttgagcaaatcaacaactaaacaatttaacaagataactgcatgtggttggactttacattttttttttttttgggtgaatgactggggcaatcagctccaagaaactagcttaaaaaccacaagggaacacagtcgagcttacatctgccataacagcaggtaaaacagaatcataaacatgccaatcatcatctaaagacattggtaaaacagataattgcacggttggactttacataacagctgcatgtgttagattcttaaaaaatgtgttaactgctaataatgtcctatgccttgtgtctaaggacatatatgcatatgatggagatcaaagaagagagttagttaccttgtgatgcgcttatcttaatttccttgttgtgttatgattttctttggatgtgtgctatataatactactatatgatttgcttatgaagcaagatatcacgaattaaagacatggtacatgcataatgctaatgacataacaacaacattaaatcatgtttcatgacaagatgcttgattggtttccctcttatgaatcatgtatgtatactttgtaaatgttgattgtagggtgaagccatatataatataagtgattaatttatacctagatagttgagaaggcgtgtacaaaatatgatgtccttccgcagatgaattgcttggttcacttgaggctttggattctctgcaacaatgtagagagggagggcccctagtatgatattatgcttcctctgaagattcagaaaacctcagctcttagatagcacaaatcttgggcgttaaccatctcagtttcgttgtttcaaatatgtggtatttattcaatcaacaatttatggcgacaagttctcaaaaagctctgctggcgttttttcttctcaacctagttggacatgagatactatgactatgataggtcttttccttgatatgattgacaaattggcaataatttaacagcttccgtgacgctgtacttcttttggatattctttatttttcaccattttgattctttattgtcacgttgacaatcttaagctaattttacagcgataatgccttcttgttgcttgttgcttcatattattgtgctttttttgggttggtttgacaacttttaggctattttaggacaagaataacaatacttggataaatttatttagtagttggttttatttagttgtgaattttaatattagatatgcaaaataaatcatatctgttcattcgatatcaacacagcctacatcaatggcaatcaaaatattctggtagaaggccgaaaagtagcatgtgtacaaagactatactaaagagtggacatttttttttttttttggcaatttgtttagggggaaaaaccctaaataatggacattttattgtttaagaattaaggaacgaatatattacttgctttaattttttccctacagagatgcagatgcttatctaacagtatttagatgacaatacaagaaaaatcactaatttgaatggttatgggatccattccttacaaccaagtacacattatagttttggtcactggtgagctactctgtacatatacaaactcactcaagtgacacgtgtaaagtatattaaaccaaaatttaaggaaaagaagaagaaaaaactgagggtaatatcaagagtatacatgtgaccaaataagatcaatccttttgactgttgtttctgctatttctacctctctaatccttgtttgcaaagagggcaacatgatgtaatttttagccattgatccacacattttaggtggaacatatgggaacagggcaattgtctaacttcctctttgtctttgtacttggctaagcagatacagcattcctgtaagcacatcagaacataacaaatctatcaattcaatagaaattgaaatatgacaaatcttaaaatgaatggaacttaaaagcatacatccaaatcgagggtaaaaatgcccaactacattactagctgttaagtggctagctagctgtacatcaagtcaagggctagtaaacaacacacttgtcatttttgtctcatttagcttttagggttgcattacttgagctctattttgatacatttctccatgaaacacatgaagtgcataagttcattttaatttataggagacgtttaatttattttatctttctattttcttctagtaaaagtgcttgtagaaaaaactatccaaataaggcctagtctatatctactaatggtaccacttactgggtcttcattgatcaattgtttactgccttcagagccattgcgaagctctaactctacaccggcttctttatgtctccaacttggaagttgtgaaatttgatcatcagaagctcctttattggaagaggccatgttcatgttgtagccgaggagggtgctaattagtggcacacagcagcataacaacacaaacagtaggaaagggaaagagtagcacattgcattccaagcaaggagaatgatgcagagcacatggagctttggagcatgatgaaaagatccaaaacgtgagtcaaaaacccaaacatttcccatcacaaaccatatggcgaagaaaagctcaagtgaagtccggcatttattcatcaagtgtgacatcctgtacaatacagtgcaaattaaaattacaacttcaaatttcaaccaaaaaaaagttgcatggctctaaaaataaaaacaaaaacttgtttctctgattgagtcaatgacttctccaacatttattttcagtagggaaactctcaaaagcacttctgacttgtatccaaacaggtcttatatgaaagttatttcagacaatataatacaaatagagtttacaatttattttttaattcctaattggtactgttaattcttggaaatggttttcgtcaacttgaaattacaatacattttaatagaaaaagaagttggtaaaacttctatattagtcttttcaattttcacatgatttatatcctcaacgagataaaaaaaaatgcaataaacaaaagattctactctttcaaaagtaaatgccacgaactgatcgcagtgaaaaaggtatgtgagggtatttgattcctccaagctctttttaaggggataaattaaaattatgataactttatgattacttgacacttggtattttcctatcttctaacaatccaacttgttttgtccaaatattatttataatcaattcaaggagaacaatttatttttatataacagttatatttaaccaacaaaacgatggtatcaagcttttctagcaaattttagagcatactcatgcattagtacactataatatagccaataagtacaattaattacccattcctaataataaaattgtctgaaataaaattgttgaaggttgaagtgcacaggatacctggtttcttcattgtttctctgctgttccatatcagaaaggctgagagaatctccttgagttagataaatttgacggtagcgtccataaagtagaagcagattaagaacacagccaatatcataaccagaaatccaaatcctcataggccaaataggtctctccctcttggaaatagccaaagtgaacgttgtaatcgttatttggagaatcaaggcaataaactccagcatcatccaagtgctagaattgaaagggttggagccaaggttggaccttgatccattttggtaatgaaaaactcttctcaaaaaggcaaaccatctggctctagatattctcatggccatccgaaccataaaggaaggaggggtgacacgtggaggcctgtttcgagcactagccactctatcttctgaggcagaatttgaagaaaatggaaccatgctatactcttgttgtggatgaacaaggaagcacctagaattcattggaaatgttttcttttgcctgtgtgtgttgagaatttgtccaagacgtgtatcagagatcaagtaattgaatccagcagcagtattaatttcttaaaagcacaggttttcatcaaaagaaccttgaaattgaagcatcccaattggcaactttgttgatggatggaactagtaccttgattggaagatcttttctgggtctgcaccacctttaactcctagcaacataatcagacaaatatcacaaaaagcttcaataacatgatcctttcagcaaccacaaactgtagagaaaggttaagaataggaaaaatatgaagaggggatggagctgatgaagtgtatatagaagaggaggaagggaagattggtgtgaaggatatgtcaggaaggtgaggttgtgtctcagagggtgacaaagaatcgaactgctaagttttgctttgattcgaagggaatcacaaggtttggagggaacttaaccgttggccaacttcctctaggctttatttttatatgaagccaagctcagaaagcaattggacttcaatttcccttcttttctctccctttctttgtcggctaaaatattttgatccgtaatcttattttttgtttttgttttgttcccataagtttaatgtccattttttcgtcttcttgccaatattttgttaattgactgaaattttaacttgaatctaaaaaaataaaacgagggacccaaaagttattttaacattgtttgtttgtctctttatatattaaaagattatcacaaacgcagatttttattttatttttttggtgaaaataaagtgaagtctatctctctttgaaataaagtgggctaagacttaaaagttattatctgatactatacgctgggcatttgtttacattatggccaacaaaatttcaaccttttaattctttatatgataaatgaatcataaaacatgatttgaattctggcgggtacagttgatattttgggattatgtggtaaacggttggccacctaatccaaccaacagttaatttgtgtcacattggagtagtgtggccctccttgtgtctaggaataattgctatgttttacgtattaaccacacaactcctaagtttcttctttttattacatgttgtaaattgttctaattgaagaaaaatctttgaagttcggttaattaagagtaagattaaatcttttgtaattgtatagactcatacaggagcgaaactaggttcttcgctatagggacagtcaccctccgagtaaataaaatttactgtcacccatccccatgaattctaatattgacccccctccctctcgatgaattttactatttcttcttttttacgttgatgatcagtttatagttttatatttctaccagagttcttggtaatatctgtatcttattttccaaagattccagtattatctagtcaacacgcgtataaattaaaataataaaatttgatttcaaatattaactaattaattatttcatatgctataaataattttagctattatagattaattgcttttaattacattgattttttggtacaggttcaactatgttaattattttcgaatatgctttatcatttatttagtaggttttaaattaatttttttattacattttaaattactcttaatttgatagataaaataatttaattttgagaaaaattatttttttttctatgaatcattgtcaatttatgtgttaaatttttgcctctctatcacttttttcctgattccgccactgacctcataggtggcctaacctaagtttaaacagcgccaccgatattttttttcagatgaaaataaggaaccgctagatggtttctaaagatgattgaatgtagagttgtatgagtacaatattattttgctacagtgaataagtttatttttactaatattataggtctgtcaaaaatgtgtttggctaacagaacatcagttgcgatgatttctatagtcgttagtttgactcataaattatagtcgtattaggccataactaatattctagaatcaaaattaacttgtgggatcacgcaagccgaatgggtcaccatccgctgattaatgtaggagaaagtagggctagcagaagtaaaaacaaacaaaatttgatcatattgctaagcaattattggaaactagatatagacctatgcattgaacatcttaaattaattttttctattgatttttctatttcttcgtatgtggtcattttggtgcatacatgcacttgatgtagagctagtgttagtctccatttgttttagtcattcaaaaagcataaactaattaaagagattaaaattacttaaaaaaaaaagagatttttttggttacatgtttttttttgttacaaaaaaaaaacactgcaacgtagaattgatcattgatcagaccactaaaatattaacattgcaacgcacaccttggcccctaaaaggaaaattaaagtatatgggtggaaaattaaaaggaaaaaagaaatgaaaacgtagaattgtcgacccaaactatcgattatacctaattttctatttggttaccataaatccaaatcaaacgtgggaaagcctaaattagaggccaaaaatttgacggctaaaggtcaaattcatgcgttgttaatttacgaatggagcaaagtgtaaaaatttcaaatatacattttatatgatccttagttctaaatagatcagagaaaaatcattttgggatcaatattaatttttaatttttaaaaaagaaaaaaggtcgcgtcaagtttaaaatcaacataaaataagtggccttaaccctcacgactaaatgctgaagagctactacataaaaggaaatcagagagggaatctataaggaatgagcgagatgtttaatcagcgtgataattaaggttacttgaatgaataaaattaaaccatgcgttaaccattaagaatttggcaagtgttgctgaagtggctatattccaaagaaaacatataattaacaaataaaagacgtcgattaagtttgttttgacgtattaggatcaaatttgaccccaatttgggcggtgagacatgcaacgtgttagtgttgacgtatcttgcaaaggaaagcaatcactttcggaaaatggataagaaatgggaactgttgaatttgaacacgaaacttatcttcatgtatacacggagaaatcaaaaggcttcaaagttgaagcaaaaaggttgattacgttaatttgaaaagtatgcaaaatcatcctcaaaatttcatgtgcttgccccggttgtcctcgtaccaactataaattcacaaaacttctaaaccaaatttaccatatgctgtgcatcaatcacaaattatattagaatttacttttacaataattattgtaaaaattacaaaactccaacatcttgattaaaaactatttgactttgaccaacttcgaacagtagtacatttggatggttctccaataaaaggtgcatgtcacattctgtatagtaactaaacaattgcttgagttggataggttagatttgtacgcgcatacaaatattcaatataattgagtaaaagtcagtcacatacatgcagcttccgatttcaaggcataattatacagcacgaatttgttttctcttgtcaattaagtgtatcatcgttaaacagtaaggacaaaaaaaagttgttgctagcgggggtcttaattaccgacttcgtctatcataatattgtgcacaatagattatatttgaactgctttttcagactgatattcaagttaatgatcaacgaattacaacaactggtctgcaacaaaattgactacaataattatatggatttatctattttcaatttttatataatagaaatataatttattctccccttttccatatatttttaataagattttttgaaagttctatcatattgtgtcccttaggtaggatcatgaggtgatctttaagaaccaattaagctcttggagataacaaaagaaatcagaaataacttcaaccgaaagtttctgcataatacatcaaataatactgtaataggacttaaggttttgttctaaaaggaacttggtgggtctacgcaggccatgggatgtacatacatatacatgcgtgatattaagttcttgacacacatgttgcttgttacaaaattccatttaaaaattccgtgagtgttatttagactcctcactcccatcccatgtgtttcttgtgctctgctctttcgattcaggataatgcttaattatttacacctcacgtggcacttacaaaatatatcatatttatagcatgtataaattataacatatatcctacttatatattaaaattttatattatattgttttaaatgaaaacatgtttaaatatcctatttacgtaatccctaattttttagaattgtagcgtatatttttaacccgcacaacacatggataaatatcaattttaaattcaatttagccattatgcaaaaacaaaatcaatttaatccttatttgtaattatgtcctcactgattgctacatttatatcatcatttattggaattacaacaaagtcaaatgtagtaactaatttagttacaacaaacctaatcatttaaatttgtaattttttttactaaaatgtatcaaaattaaactatctttatgtaaaaacaaacattttttcctgcatgcaaaaaaaacttaaaaataattattctggacattttaaacatgtgaattgtgaatatctgatccaacgtaaactttgtgtacttatgtgcatattttcttaggtccattgaaaaagtatgaacagttattgaaaaagtatgaacagttagactttatgtctgacagtaatagtagctcttaataattagacaaaaatagtttttgtccaaagtatactttgatttttcttaatttcagttctaggaaaacaaactcctatgttatcaatcacaataatcaaatgatatagatgaaaagaataagtacaaacaaatgacggcctagacaggctccactgctagaatggcaaagaacaatgtactagcactctaccagacatcttcaaccgcaaaaatatacagtcatagacacaaatagaaacctaatttgccttctcctttaccttgtcatcaggtttgcccaaaacaaattcagcatataaatccttcagagcaatcatgactgtagttatcaatggccccaaaatagctccctgtggaacaacagaatccttcagcaaatgttatgaaatacgaggaaaatgcatccatacaagttcactaataagccgacccacacttgagctactacacctatacattggatcccacatgctcacacacaaaagttacacaagcagataaccatttcaaacgaagttgtgcaggcaaaccagtctaaattctagaacaaatataggttagaaatttcatgttaatctaaaaaattacaatgtaagactattagtagttcaaattgagtaagaaaagagtaaatagtctatgtacactggtagtataaagggtttttacattgtcatatatgataaataagtttattaattttttttacaataaagtcatacctctatgagagtgcataaaaattaaacactaaagaaaaatatcagaatatcaaaacatggaggggtaacaatttacctctagagctgatggaaacaaagccattcccccaatgatgctcagtccagtaagatatgcactgtgtccaggcacatcttcaagaatctcagttgccccataatccatgaggaaaaggtgagcaacagacaagaaaatggccactatgtatctgccttctagtaccagctgtagtgttgctggaattgttgcaagccaagatggaaatattggtagcaaagggctaaggaaggcaatgacagttgacacatataagaaatgtattctgtatagcctaaacaaaagccaagtcaggcatccttggaagaatgcaatctcagcagtggccaaaaggactcctgaaatagccttatccaacacttcaacacacctgaccctggccgagtttgacatcggaaccatgttcatcacttgttctgttgccccacctgactctgatgtgatgagataatacaaaacccagaaaaacaccattgcctgagacacaaaattgaaaacctccgcagcaccagagactatggaattcaaaatggagatcacaaactttgcaccacttccaagcacacttgtaccactagccaaaacacgctgaccaacatccatccctttaaccgcatacccttttgccttctcaaccaaatcccccctagtaattataaggtcttggaaaagggtatcaagttctgcataaatctccccccactccttattcctaaccctacccttcaaactcaagagcttttctgtgtatggtgaaggcaccattaacgaatccgttgaagaagagttagcactagcactagcaggagcagttatcacaaactgcttaataaccgtcacaaattcagtcagattgtactgcattgccaacccatcaatctgatcagaaaccgtctcatagaactgactagtgtacttatccaccatcccagcaacatcattctcctccatccacttcttcacaccgattctctcagcgtaattgttctcttccactcgaaccttcagcgaaatcactgcctctttcccttcgccgccaatcttgtaagagaagaatataaccccactcaagaacccaacaatcatgccaacaatcaacccaacagccacaacggttttcaacctcttcaatacccctcttgtgaaaaatgcaccagagggaaagaaaagtgagaaactgaaatccacgttcttggaactgaaaacaaagcctaatcctagaagtgacagagacccaacagcaccaagcctctcataagcagcaacaaacaccccaaaggacaagagcaaacgaagcacggtggaaaagccgctacgcttctttgtgttgtcattctcattctcaggctttggcttcctgagaagggttctgagagaagcttcacgaatctcaacaagggttgtaatgaagagcgtgaagacggtgaggggaagggcgaggagggtgtgaaggaggcctagattgagagggtgagaccaaaagcaaacggtggtttggtgaatgagtctgagagggatggaacagagaacagcccattgaaagggtttgaggtactgttggaggagtttgtagagagagaagaggatcagaatggccatggcgagcccggcgtgggccatggctatgtagagggccaggcgcgcttgagactgagagtcgccggaggggttgactttttggtcggcatttgacggcggcggcggaggaggaggaggatcggaggtgggttttcggagggatgcggatcggaacatgtcgtgccacggtggggtggtggtggcagagttagggtcagagtaagggacaaggtccatctaagaacagaacagaaatagtagtgaagtgcaaataatgttagtgaatgaatgtgttatgttatgggtgtgctggctaaggatgttgtgtctgtcagtaaggattgaatggctaataaaagaaagagatacagtaatagtagtatcatttgatttccaagttttgtggtaaaaaagtgaacactgcagctttttaaactgacaggaagtaatagtacgaactatgaatatgaagtgaaaagattggaaaaaaaaaaaagagaggaagaactggtacttggcttcgttcgtgtcttatgttccattgcggcattgcattcttcacgtgcccgcaagtcatcccaatcttcatcataactaaattagtatgagatttcgtaagccattaattaattaagtaatcactaacagttttatcttatatctttaaattactctactcacgaacaatactgtaaagtgtatatttttttcttttgtttaagtaaaaaattaacatgtaattcttttcttttaatcgaaaatgataaggaaattattgataattttaaaagagagttttatggaagaattgaattataactcaataaatttaaaatttatttttttaaggatgagatcaataggtacttttattatttatttatttaaataaatattaagatgtatttatttttaaaaaatattagaagagacaaaattcaatgggtctaatccataactaatttataaaattgaatcttatctatcttacaaatatatcaagggataaataattgatccaattattagattttttttaaggctttaaaagagtcgtattattaggtgaaaactttatgtccaattctataacaaagattgtagcaataatgtcatgaatgactaggattatctaatttttttttttttaagtataattgatatagtttatgcgcaatcaaaatataatttttggggtggaatttctgccatcaacctatggatttgatcatttttctaatatcttctatagtaaaatgtgaaaaagtacctaatttaacggaaggggaagaagaattaaaatatttaatgtatcataatgattaaaatgtacgtattttaagtaaaaggttgataaagtatggggcagctacttttttttttttaaaaataaatttatagtttcttatctacatttttttttaatttggttgctaaagtttaaaaatttattttatttcctttaaaatgtttgttagaacaaattgctccttagtttttgtcaccaatatgtcaattttggttgatatgacatacatttatataatatgacatttttcaccgtttgccacgtattactaagttaataaattagtatgagaaactaataaaatggtcaattcagtttaacatagacattttaagaaattaaagtgatagctttctaaatttaagagaccaaactgaaataaaatatgtaaataagagatcaattttttttttaacttttctttatggtatatgggtcaactaatctatgttacaacagaagaaatggaagaaaaaaaaaacattaatttcatttgtagattgaagcatcaagccgtaaaaaacataactctgttatgaagcacatttctttaaaatggttggtacttggtagagcttgaatacagtatttattttttcttgcattgcgttttttcggctactgtttatcctgaaaaggcaactagacagtagacaccagcagagacacactttttttctcaaatgttgctgtttagttaacaacagcatagaagacatgttgttcatttcatgagagactaattgcaaatgtcaattcttctgcggagacagaagtaagctaacacgcggaagcatagagccatggctaccagaacccatgcttcagttaagcctccttccaagtctacagtgtcaaatgatggtgaactctgcagtgtcctgcaccctccttcgctttcacactcatatggttgctctcctgaatactgcacttttagaagtagtctgaacccatagtacacgaacgacaaatacttcaaccaatgcatcatcttcggtacgtgctgcatgcaacacaatcaagcgttctgtgaaggaaggctagcttttgaataaaaaatgagtacaactcttaccaaatgatcatgcatgaatatgtcacttccaaaacaaactaattattggtttatgtgtgttaaggcatggatgtgctgacgtgacaatgcattaacatatgaaccaaaattgtacaactaaaatagtagggattaaattcacgagaaaaaaaaaagatttgagaggcaaaattcgtgaaattgagaaagtagggagacaaagttgcagttaagcatacaaattacaatgttgctactccttgtgcatagcatacatacctggacatagtagccacctgtgagaaggaataacattagtatcaaagaagcaaccatccctgctctttgaatgctcataactgcagctccaaatagttctcctgccccctattaacaacattgtattcattaaagcttcaaacaaaaatgataacacgtcgtttacttattatgagtctcaacatagcttacttgacttgttatagctattaaaagcaccgcgaacaaagtcaggaagaagcaagcaacagtgctcttaaatccggccatgaagtacaagattaacatgaaaaaagtagggtagaaaacatgtgccaccatgtcacacagagtgctgcttgcatagtacacactcagtctatacatgtctgcttttctttctttcaccaagtaggccttttcaaatggaaagacatagactgctccaaaaatacatgaagatgtccagaatatacatatatagaacattaaaccaacctgcaccaaaaatagtagttcattctaatgttaatgttgaagagacaggtagagcagctcagccttgaaaaaattgaaatcaatatcatggaaactacctgatctctaacttgagcctctgtattggtagaagatttccaccaaagtaatcccaacaaaagtgcaatgccaagtgcttgaactagtcttaatttatcaaaatagtccttgcttcttgctttgaatgttctcttataaagaataacgaattggtcgcaccaactcactgtccagtcccttttaacctgaatggctagctgaagatgttctggtgtgtttgctgctccatgattctcttctttttcttttggctccagtgtgtctttgtacttgagttgtagatactaacataaaataaaggatcaattattaaatagaaatgacatagaacaagcatataagacttatataatacataaatctaacgttaataacagcttttgaagagtcagcagattcttgatctttcaaaatatcttgtcgaacgcttatgttattcacttgtccagttgccaagtcaagcaagaactctgcaggattcattggtatttccgggatgaacctcaaggatgaaaagtactgcattgagtccttagccttcccgtagtaaatgggatagccttctgatatcagaagaagtttgtcaaacatgtgaaagattctgctggatggctggtgaattgttgtgattatggtccttccaccctttaggcaaatcaaaagtaaattgtggggttatagaaatgaagcatgttatcaaaatgacagttaaatatagttactgataccttggcaagcccctgaagagttagaaggagtctgtttgctgaggtggaatcaaggcccgaagttggttcatcaagtagcagcagtgaaggatcaacaaggatttcatagcctatgttggttcgcttcctttctcctccagatatgcctttcagatatcctccacctatttttgtgtggcggcatctatgtttatataagagattatttagggaagcagttttatttcattctttgcttgcggcttactcgaaatcataataactaatttttagtcaattgtggaagattcaaagaatcaattaatgtaacacacctttcaaggccaagatccttgacagtgttctccactctagcatatttttgttgcttgctcatattgcttggcagtcttaagaatgcagagaagattaatgtttcctctactgtaagttgtgggaaaagcacatcctcttgtgtcacaaatccaatcctataagtcagaaaaagaagaaaataaaacaaaacaaacagaagagtgcttatgttctgttaaaatataaaagcacatgtcatgacatggatgctgatgtctatgaagctttctaacctcctcttgacagctggattaaatcgaacatcattataagttatcttcccctgcacattgtcaattaatcttccacctataactctcaacaaggttgttttcccactaccagaaggacccatcaaagcaagaatttcaccagggccaatgcttcctgtgatactcttcaaaattttcttgtatctatcttcctccacgtggtgttgtgtgcctacttttgacatcattgtcttcacagggttcttggaagccgcttggctatccctcaccttgaactctacatcttcaaactgcacattaatgagaattttgagagcaaatgacagtaatcataaatacacaattaaaacactgttgatgagaatattcttattgaaatcaattttcaatatcaagtggtaatcatcaagatcctcaatagcattgcatgaagaactatgattctcataaaaagaaaaactttgctctaatgcaatcgaagaaaataacatatggtccatgaccatcacaagtccatggttctggccgatttctatgtaccacacgtaaccgaattttcttaactcttgtaaattgaaaaactcgattacatgccacatgaaaattggccgaaaccatctatatgtggtggtcctgaaccatactataatttctcctaatgcacgtggaaagaaaattctaataaagttgtagaatttagccatttttctctaccttgagataaatggggagggggggatcttggtcgaaactgaaatcctcaacttttatgtcaatctctgtgtacatatttggaaggtatgcctgagacatgaactccatgctgtgaccaaagccattgctccctgcaatctgcatggagccaatagatggaggtgacattgacatgtcctcaatctcatcttctctttccttctccatgatcttggattctatgagaactttgttgaagccaggtagtctaataatgtagtttaattagatatatcgtgagtcaactgcatcagaccaagaccttgcctatatattgaggcagaattttagttggtgggccacgtacttttcatgacaagttcttggtccatgaaaggcatggatgttattctcacatatcctttcaatttaaccattatcatttgtcataagaacatgtcaagaacatgaataaattggcttggtaagtaattgaccattaatggaatacacgctgcatgtctttaatctcgtgtctatcaaattgatgcaattcgtctcattaaaaaaaataaaaatagttcatttacaatgaataataggctaaattatgtgattgataacagtcatgtccgtaacggcaatgccattttgtagattcacttctctttttcaagtgtttggtgctttgaagaccatctaatatttgtcatgtatactttttactcacaaaacactgatgtgtaaatcagtaaatctatttgacgactcttttagtgttgtgggatggtcaaccggagtcacgggtataatttgtagacaccttgttttaagttcaatctattgttttttaattatgctcattaatgtttggttgagtaatatgtgataatattgtctgaattaatcatggtcattgtcttgttattgatgcaaacaatttaatattatatttctaaacattctaagtttgatttcgttaaccattacttcaaggcataatttaattagaaattaaaaatttaacatttaacatttaattagaaattaaaaaaatattaagaatgtaacattaaatgttacaaatagatttttggtgtcgtcattttgtagaaagcctatgatttattgacttttttaacaatcaatagatgataaaactattcttaattttagataatattaactttaatgcactgttgagagaattaacagccatagatgtttattaaaggcatttcagattaatatattatcaatcaattctcagaagattcaaaaagaaatatatatatatatatatatatatatatatatatataagtgaaaaatatgtaagatatgataggaatagaaaaactgaaaaagaatatgtatctaactgatagtacagtgaagcaagtagcattaatcaaactaatttgttagcagtcacagtatagcagagcggttgtgttgggcccaaaatctgtgttttctgtcttgatttggttttttcatttcatgggtcacccttcatgcagtcatgccaccatattcactttgacgttgaagaaatttaaaacgaaaaatttactagtaacccattttatcgtaatttttttaacacatctctaataaaaaaattattattacttctgtaagactgtaactattatccttaagttatatttcctctaatttcgtatataagtaaaaacaactactttcatattgattaaaaaagataattaaaattatttaattttattaatctcaaataaaaaataaaattatttttaaaatattctttattagaacttgatattaaaaataacatttttacttataatcagatttgcttatacttgagtctaaaataccaaataacatttttacttatataagtcgagagaaaatatttgatgatattaaaaatatgatcatatgatcactaatgcacctattagaaacttaagtgtgtttgagaaaaggttagcaatactaattgatccctttacatttttggggagcaatatatatacttgaaggaaacttggggcatgtggactcgctttgtcaataaaaaaaattcagcaaagactcgacacaccatccttaacctttcaaatgaacaacggaatgaaaactacctgactctcacacacaacacgaatccatggacttattaattgaaagtataaattggataccaaaatttgcaccctgtcctgttcccaccctcggaaaatgaatgtataacgtaaagacattaatactttgtttagtttagaaaataaaataaaaaaatgagaatggattttttgttttaaagttagatgatattttaattgtttaataagaaagaaaatgaaaataaagttttatatgtgttaagaaaaaaaagttgtatctaaagtgacataaataacctaaaaagagagagaaccatgacaaataaataaataaaatatcattttagtccttttataatataaagcttactttcgactcttttttttctctaatttgggcaaaacaaatttttggtggtctcaacaaaaaatttcttgtttctttgtctcctctcttttcaattcaaccaaagagagtgtaacttttgaatggaaacaaaaaaattgtaatttaaattaaaggtgttacgaagtagtttgagtccaattcgtaaatatttttttcatgggacagtatgaaattacaaatgttagtaatgggaaagtaatttatactcatgaatagtgaatcatttcttgttatgagtaaaatgaccttgccactgaatcacaataagatataactgtccatgtccatgagagattttggtccctatttcaggaattcaacctacctgatggctatctataccatcaatccaaatgtagcaaataaaatctaaattacactaaacttgttagtatattcttatatcataaatttgaatcctcatacgtgaataaaagtatttttaatatattcttatatcataaatttgtgtgtgtaaaatttacaaaaaataaacattttaaaatatataaattatattgtaattcaaatcatactaaataaatatatttaataaataagttatattttagatttatatgataaacaattatatgatgatacaagattacttttaacttctgataatttcttttaaaaattgaaatccaatttagaaataaagataataatataaattgaaagagaaaaatgattaagaaaagtcaattatatgtatattgatttaagatggtcaaaagagaatttcttttcacaagatattaagccaaccatctcaaaacactctctttttatatttatccatgttttattaatcatttatctcttttaatttattttctatctttattttaaattaaaatttataactttcaaaagaaattaaattataaataattcaaaataatcttatattacaatataaatgtttatcataaatacaaactataatttatatagtaaacaatatttatttactataaattctaattataatataatttatattttcaaaactaatcattttttaaagatttaattaaataaaaataaacatttatcccatataatatatggactaaaatactagtttaatctacaaaagagaaaagaaaaaaaaaagtttgcattactttaacggttaatggtaccaaccagttggtaggatatcttcaaatctgcatttggatcagttagtaagatggaacttttgcatcaagtttagtgatgatatataccttatcagaaaagacgttgtatccatgagattaggcaatcttacctaaactaaaagcgtgcatagcggtcgttgctacaagtgtcttgactatttcctaatgatataacaataattcatgatgttatattaacttcccgtaaatcaacagttacatcaattcctagtataccagatatcatagacaggtgttgcatgctagtagtaccttcttcagctacacttctagtaagcttgaattgagaaacacgtgttgccaaattgttggcactctcatcaaatgctaaattctcttggaacataaagcaaattcccttcacttttctcttttgtctttttattttttttattttcatgcaattgaaaaacccctccttgaagaatgtcaattttctgtttccccataagcacctaacatacattgattgtattttaagcaacatggcctattaattcatatttatatgacccttttttctctttgcctttctgttttggcttccttaatctaattggtatagaatagtgttttagaaagagtgtctagcatcttgaataaatatgtgatccaagtccatgaataggccagattgttatggggtggttggattcactgtggggaagaggacgaaagtttattaaaaggaaagacagtgatgctggcgatgcaggtctttctgaatttcttagctgatttcattgtgactcagttttatttcatgcaactgagtggttttatatctaatttgcataatgtacatccaacttttgtttttacctatgttcatatattgttttttttctttttctgggattggcttgtgaacttttcatgttcaactcttgatgaatagatcccaactatcttaatcttacattaataattattttcccctgctcattctgtgtgaaatactattcatcgtttaagaatcattggatactccggccttggcggttgtaaattataagtttgttacgttactctctctctctctctctctctctttacattcataatctctgttgtttatgttatggttttactgatcctagaaactttctgagacccattttgattttgaattgaactgatacttctctgtttatttttctgcaactttcattgatgttctcagtagccaattaaaaaaatgacacttgaaatgaatgtatgaatttgatctaatattcatcttgttttcattcttccttctttggcatctgcccttatgctccattcttctttttctgttaagtgttgaactataatgcacttcttttatttccacagctgattagaactcaatttatttgagtcttctttaggcaaaattctcatgagtatttgtaggagaaaaaataaaataaaagaaataaaacaagtttctccattaacttatatgtaaaaagtattagttttttcaaaagttgattttaactttatacacaagctaattttgtgccctggagtaatattggggacatattcaatgtttacaagtttcccttttgcaatgaaatgattataagatattactcattagtcattaccattgattccaatatccttgatcccaataccaatataaactagacttggtgtacgctccagctaatgattgaaactatatcaggtagagcactggaagaactcagagcttctctctacaatgagatccgaacctcagaaggagccaagcgccaacagcaaagatattgtggaccagtggtggcactgtccttcaattttatggttgctgttgggattatcatggcaaacaaattggtcagtacaatttgcttcttttctatcatgtattatataatgtgatgaactgaatgtcccaactagtcattacaagcctattgattgatcaagcacccttacatgtatatgttgttaacaggtgatgggtaaagttggcttcaactttccaattttcctcacatttgtacactacatcactgcatggcttctccttgccattttcaagacactctcagtgcttcctgtgtcccctccatctaaaacaactccattctcttctttatttgcacttggtgttgttatggcctttgcctctggccttgcaaacaccagcctcaagtataacaggtttattcacttgctttagcatctttatgaattatgataaaaagatttggaactttactttttgctgacaatccagctcttgcagtgttggtttctaccaaatggctaagattgctgttaccccaacgattgttcttgcggagttcattctttttggaaaaaccattgattttaaaaaggtgaggaattactcttcttcccttctttttcttttctactcttttataaagcatttcacatatcttaaaaaggactattccaaccccctttctttgtttttagtgcactaatcatgtatgtcattgcaataatgcaggttttggctttggctgtcgtgtcagcaggtgtagctgttgcaactgtaacagatttagggttcaacttatttggtgctctaattgcaattgcatggataatcccaagtgccataaataagattttatggtctactttacaacagcaaggcaactggacagctctggcgtaagtaatattaattagagtacatttggaagagtttatttgcaacttatttggacttatcttgcaacataaatatttgtattagcatttgacttagtttatgaaaataactttcaacttatataaaaactgtttagccttggtttctcttcgattttatacataagcatgatacaacatttattcaagaagtgcttaattaaactatttacttaaaaacttttgtgattgtagattgatgtggaagacaaccccgatcacagttttcttcctcggggcattgatgccgtggatagatccaccaggagtcctatccttcaagtgggatgtgaacaactcaactgcagttttggtatctgctctccttggttttctcttgcagtggtcaggggcattggcattggggtactgagattacattcctcttccaacaccattttttgacatataatgttgttttcttttaatgttagataacatcacactatgaatctatgattgcagggccacttctgctacaacccatgttgtcttaggacagtttaaaacatgtgtgattctgttgggagggtatctattatttgactcagatcctggggttgtgagcattggtggtgctgttgttgctctctctgggatgtcagtttacacatcattgaatttgcaagagcctcaggagccttcatcgaagccgaaatcaacaagtgaagacaccacatctacagattcaaatgtaaatactactaccactaccactaccactacctctagcacccttgtatgtgtcatatagtagatgatgaatcatgaatacaagaacaccccatttttcagacaccacgtccttggttttagcaattagcgaaactttatgtatagacagtactggaaattcgttgagattttttaagggtagcttgcttttcacaaagttccatcaatctctttaatttcttaaatgaaaaaagcattatcaactattcaactgaatgatgttcaagggctttggctttagcacacatcttatataagttcgtcgaccaccactgacacactctgagataatgacttattactcaacagatgacatgtctggttaagttagaaaaaagaaacgagcatggtcttgcaaatggaaagccacaaaaaacagaggagtttccacgataaatttagccgctattgtattcattatttagggaatgtaacaaatcgttaatttcgaaggtttaactcattttcacaaagtgaacaagcagtagaatcattacaccgtctataatgtttttgatggtagagcaactttgtttgaaaatgttacattgtaacctcaaatcttatactaacactttataagaaaggtaaatgtaatgattaaaaatgtaagaaatgtttgtataaatacacaaaagctcaagtgtatagctgtaattttattttgatattaatattaatatcataaaattattatgtggagattttttaatactttttaaaattttgtatattaattttaaaatattaatattttgtttaataatgacatccatatatcaaatgataaattactatagaattttgtaataaaaataaactttgaatgactaaattattaaaataaagtatatacataatataagtaataatgttagtaacttagtattattataattcaaattaatattaacagttcaaatcaatattattttttccttgattaattattcagttaacatatttttattttatttttaattcatttaaataatacttaacaaaattatgtataatattaagcataaacatatttcaaaataacattaaaaattgccattaatagaaaagtgttatctacataacacaagtcaggttggtaattgtattcaaactctttttttcttttgaaacacaaagccgttacatttatgaaataacagtgtcgtaaatacaagtattaaattaaaagtctgagatttagcataaaattacaccaaataagttatgtaataaaacatctgagatttagcataaaattacaccaaataagtatgtaataaaaattctgagagctagcgtaaaattacacaactgcctaataagtgagcaacgtaattaacttgcatccttgcacaccaccctccatggtactcaaactctctttagaaatagtttgacttaattaaacatttcatgtctctagtttctcgatttcgcaaatttcatttccaaattttctacatgaatatgattcttcactgttttaatttaacatctaataaccaaccgaaaatataatgtcgcattatttagatatatcatatttaacatctaacactcgtgaaaaaaaaattggaagatgaagttttctagattaaatatatgaatttttttggagttactaaacatatatgatttggtaagagttcatctattaacatctaaatatttaacaaaaaatactaatgtaacattgtcacatcaacaaatccacatatatcttaatatcacatcaatattatcattaaatactcaagttaattaatagatcaaaattacataattaaaatattaaatcaaatttgcaaaaaaaaataaaaatgcaattcataaaattgagaaaataaagaaaccaaaagtacaataaacctaataattttaacttataccaaacacattagactataatttatcattgtccacgctcacgtaatcatgggatcaagtatgcaaattaacatttttttttttgccttttctaaatgagggataatggataacaagttaatacaggcaccaaattgcacaatttaaaaataagactaaaatcgaataattaaaaattaagacccacatcaaacttatgccagaattccaactccacatctatgaatgttaacaaatgaaccaaaatttacaaataaaatatgaaaaaccaaaatcacctaaaaaactatacaagaaccgaaaatacaattaagcccaaattattaagggtataaataaataacattgaagggaacagaagcatataattctatgattcccgataatttttaatgcatatgaactattaaggtttcaagaaagctgtcacacgagacctgtagcaaacagtaatttctcaataattggatgtgttgaaagaaaaactagaatcatgctggatagaaaatgaatttaaaaatttcaaaacaaaagaatcagacaaaataaatccataagcatgttggttcctccatgcaaaatcaggtaaggcttgtgaagggcttatacatgactagaaatgtgctaaagaaaagcagatatcacaattttcatgctccaaataaaattgtataattcaatgttctctgatatcaaaatgtaatatacaggtgagaatttagaacggaaaaattggtatatctcacctaccaattcttggcttagtacattatcagttatcactaggaattaccaagtttcttatatagcaacaactaaatgttctctcgggtaaaagagggagggataaataaactttaggctcaaaaatttaataaaaaaaatagaaaaagaaagcctgcaattagcacccttcaaaatcgttagcaccaaatatccccaccaaaaacatttactaattttcctttctcattctttggccacatttttatttacacttcagatcaggccagtgttcatacttcctgcatctgagcacaccatgtgtgcatatgaacattatcgcaccaagaaaattttttccagcctaaaaattagagttccaattgatttgtgtaggctgaggctgctgataagatcctgaagggggacctacagtttcaacgggcccagccacagcctgagactgttgcaaaagggttgaaggtgaagctattgtctgccctgcttgatagataccagcaaatgccccatgagcagcctgtgttggggggaaggtgagatgttgtccctgagggctaaggttatacagagaattaacttgccaactggacatgtcttggcctggagcaggtatccacactgcagagccttcactctagcaaaaaaaaaaaaaaaaaataatatgcttaggaactccagaaagtccaagaatttcatttcatgctgatgaagcaaacataaactcttaacaaaataagattgatactattgaaaaccagggaccaaaatatggaacaaaatttcctattttatcaataaatatgcatgggtgaaataaaggacattaaaaggaagtaaaccaaccagctgtcctgttgtatagatctggttttcctttaactgagacactaccagatcatcatttccagtggagcttccagtattaactgtttgacctggcgcatatcctacaggtggagtgataaatgatccagaaggaattcccatatgagctgtgtttcctgtgtttgctccagccttgaattgagggagagggaatttgatcccagcagctgctggtagatacatgctgccagcggatggttgttgagggaaaccattgtggtttaaaaattggtgtattggagacacataaattggagggtaatagtggccatatgggaagaaattagcagggtatggtggcctgaaaatagaaaccgactgtggagtcacaggtatagaattctgcaggggtggagttgggctaggggacacagcctgagaacttgcattctgcaatacaaagtaaaaataataaaaaaatagaatcatataaaaggaaaaaatatacagtcataataaataatatatgcacttgcaaagaattttacattgtcatccaattacaaaccgctatgtatggtaaatttattgacatttacaataactaccttaaaagtcatactaagaataatttactttttacagatgttaaacctttttaactttttaaaagtttatgaatggaaacctttttacttgaatgagtaaattaactttggaaaacaaatgttaaccttttactttttacaagttcatgaatggaaagaaatttaaaaaacaaagggccaatatcaaaacaccaaaccggaaaagagagcattcaaacacagggagattcggttttaataaatattaagcagaggaagatcttaggaagtaaaagatggagaaacttacaacaaagttaggaaggcgagatgtatcttgtgactgaggttcagttccctcaaattgaacttgctgagtgcctaacatggaggaaatgaaattcaaaccatagttttgagcagtttgaacagtcggaatttgttggccttcaggagccaacaaaacctcctttgactgatcaacctttgtgtcagtaccagttataggattgccatttgtagctggtgtcttttcaatcaaataagatgaagaatgtggataatcaagatgatctccttgtgcagtcaacgatgcactttgattgctatatccagacaagaaataccatcaaaacaaaaattacatgagcacaccatgacacaagtaataactttggtaacaaagaaaaatcaattaattcagccagaataattcataaaagaaataataactcagccttatgattgacaaagagcacggaaaatggcatagtattatctccaaagagaaccttcccactttcctagtactatctttctggcagattatagttgttttgttaagaagtttgatataagagaacaaagctaggaaattacaaccattaaaaagggcatgagggaacacacgttcacacacacacacacacagtcacagagagaggggtctgttatttgatatgcaaggcaaaagcacatatggagcagatgaattacaaaccttgaagttgcagcttcttcactcaattcaagggcaggagaagcattattgtcaccacctgttccactgttggacttttcacttgggcccaaagtatcaaagcttccaaacgtcagaccactttttaaagccttgggtacttggaaatggtttggaaaagtaacatgttgcctcaactctgctgaagattgcacacaagcttctgaagttgaaacctctgtggtattagctgtttcataaacatgtatgaacacgccaaaaggcattataagggatataattagagatatattgaaaagaattgagagaaaaattgtaagtaaataaataataggcaactctagattgtcaggatgattccttcaagcatggaagagtatcaaagcaagtaaatttgagggttagcacacaaaagcaaaacccatacaagtggcatgcttatttaaattatgggcttagtcatgctgcttctcacttaaaataccttcagaaatagtttctaaggttcttctcctgacctatgtcctcctattcctgtgggcttttcttcactatctcttctgaaaatttacattgtcctcctttctagtagggagagcaatgatagtatccatatggtagaattgtttgattggaaaattcaaggaatacttcaacccagtacattgagggaaataggacataaagcaaccctgttactcataagattaaacagatataaacaaaactttacctagaggtgattggctaccagaactggaagatggcctcaatgaatcatttggggatggagatgaaagttgtgagggttcagataaatgcttattttcaacttcatttaacttctgtggggcatttgttttgcttgttgaattcatggacccatatttttcattcttggatgccgataaatcattaacttcatgaacaactttacttcctttaacatgatttggtccggcagatattcggttgctcccaacttccctactaatagcagcactgacaccaagactccgggagacagatgatgctactacaggatccaaagaagaatgaacatcggatacagaagtttgaagttgatcagaacttgacacagactttccttggtcagtgctggtaactgagccaaaggtttgagtagaggaggaggatgctgcaacaacagctgcatgaggttggacattttcttgatggccagtgtccttagcagctgaagtacttttaggaacactaactatgggagattggccagcagaatcatggcctgacttcccattggattgatttgcagcaccatgttgagctgaaactctgcaatttaagaaaaatgattttgaagaggatacatatatctaactataaaaaagaataagtaatcaagccaatagtgacactggtgtatttctcatcacaccaacaaacaactttatataaatgtatttagcaatccaagtgtacaatcataagatataagatgttatcaagttgatcatgcaagccaaacttcaagcaagttgattatcaataaataatcaaaaattaagtatcctcttacttattctattcattgtaattattattagatattgaagttatgaaataaaaaaagagtacaatttgatgtttaatcaacataaaattttaagcatgacttgtgagatttggttagaattttaggcacaaaacaggaaaataagagtgatgtcatctttcacctttctttcacttcttttggagtcttgcttttcttttttattaaatacataaggaataaataagccatttctttccaccatacattttctcataatcaaaattaatctggtgaaataaacaaattaaagcaaatataaaacgaaattgctaccttgtagcttgagatattgtattagtcttagttttctgtgaaaatgtctgagtagagggagcatgacttctctctgcaatgtgattgactccattttcccttcgattagcttggttcctcccaccaccaccatctaacaacagacatcaagacagggtaacaacttacaagtcaataaactagtagaaaatttgatgatgcttaggacaggtctctgcactaaagcagttcatcttataaaaataatcaattaaaaaaaaaaaaaactaaaacaacatcaaaggattaatagtggcaacggaaaggtactttatcatgacatgctggattcaaaaggaatgtaatagggctcattaagcagcaaaataaaagcataattcttaatattcagataaaataactcagtaagaaggtgatgggaggaaaggatcacaaagtgataatatctttaaaaaaaatatggcattccaaaagtatttttctttcaagagacagggaaatgatggtttccaggtaaccatttgtggaaacgaaactccataaatggaagagacaagtaagttaataacaaagcccaaagtcaaacctctaaaaggtggggaaattgtaccaggaaagttagaagaatatcctccagaaccaccacttccccccctcccttgtccgccttgctttaacctaggctcatcagaagctctgctgctcaatccctgcaacaataaaaataacacaaaatactcaggctaataaaaaaatattaaggagaaaaagatgggacaatgcaagcacatttacttataactggacatatacaattacagaacacacagaaaaaaagtaaaaaacatatacaggcaattataaaacaagacccaagtcttttactctcagcaaataatatcacatgatcccacacttcatcataggcaggaagtagaaacctataacaacctcaactgttcaaacattcataaaaagaaaggattcttatagaatctcaacatggagtctgccaatcacagtgctcataagatgatacaatggcaactaatgacacaatgaaagcttgcctagcagctcacaacaatcaaaataataaatacacttcaatatagtggataaacaggtaaaagattcatccactacaattgatcccctcaatggcagaagaagcaccaaattaatccgattcagcaactcaactttcaagagcaagtaaggagggacgggagaatcttacccccttctttcggtcacgtctccttctcacctcatgaaaagtatctgtgaacaaaaaaaaaaaaacactcgacattaaaaagagagagagagagagagagaatctcaaatatgccataacacatttcttttcaagaaatcctaaatgattatatagtgttgaagccattagttaagaaacacgtgtgagcgagagagcctgagagataagataccatcaaacaccaacaatatcattagattattattatattcaactactatagctaattcctcgtcacataaacaaaaccctacaaaggtactagcttttatctccctgaagcgcactgatacacaatctccttgttgttcccaaacattgaacaaagtttcaatgtccaaagagccgcacacacagacgcagctcccctcacctcagcttcttacaataaatattttaaaaaataaaacatgaaaagatgaagtgaagtttgagcaacaaccctaacaaacagagacagtgaaagtgaagcttaaaaagtgggggaagtaggggagagggagagagagggagggagaagaaacggatcgcaaagaagataagagacctaaatagagaagcttctgagcggtctcattgggatccatggaacattcacggaggacggcgtagatttcgtcgtcggtgtgctgcttgccggtgatctcacggatgtcctggatgattttgcgtacattgtttgggatcggaaccctagaattcgaagacccaccaccgccgctcatctttctgtaacacaccaacgaagaaacaaagaacacactgtctctgttccccaaacttatatatttttactaatacaaccaaaacacaacacagtcactttgaatcattaatatactccatttccattactatgcctattttttattttaaatttaaataataactgcttcaaaatctcatctattctatatttgtttaggcttaaagaactgtaggtcctataaaatactttctccatcatattataattattttatcttttcaatataagattcattatttattcatttatatgatattaatgatatgagtcagaaaaatgaaaaataaattaatgatgataacattgattttataaaattaatatttttttattaatttttcttaattaaaaaaacaaaaacaataattataagaacatctttagtgttagatcttgaacaaagatcttaagcttaagatctgatcttcattagatctcccaaataaagaaagtggagagatctccaacatcaactgcacattgttcaaaaaaaaaattctctctcattttctctccctaaaatctcaaattaaaatttaccattatctcaattttagatctaccactaaaaatgacaaatagcataattcatcgtatcaatcaataaaagtgattaaatttgttgattttaattaataatattataaattttaattttattccaaaattactcataacataaacttataagtgattgttattttttaaaggataaatattcaaactaattaatataccttattttcttaatagtataataaatatattcactttcatgagaattgagtatatatcactgaatctcacaaaagattaaggataaaaaaaataacaatcaatacactttttagatcgacattaattaatgaaataatagtatgtttcttataattaaaaaaatgttattttttatttcttatataaaaaatatattaataataaataaagattaaagtcttcatatttaatttaagtgtcatatttaatataatttttaatcaattggctaaaaaattgtattaacagaatattaaaattagattcatatgtatatgaagagattaagttatacttataaaaatacattaattgttataccatttaataatttaaaattgtacaatcattttccaaaattcactaaaaattcatttcacattaatcatatttaggaaaaaaattattaatactaaattattgtataactcatttatgtacatcaatatttatttatatgtttaaaatatataaaatataaattatttgattatctttttattattgttcaatttgaataaaatttataaaaaaaaataaattttgagtctcgtatgaacttgaattattaaacataatttaaatataattcccttaattatacgataaagagtattatcattctccttaacgatgtatttgtatttttcttttgggatagttccgttgacctagtgacaacaatatctcaatcatcaggatggcttttgaggtcaggctaaccaacatggcttcttgaaacgccatgcaacaatactagaactaaaaaatcaacttgtcaaatatcagaattagagaaaaatatatgagaatcataaatttttacattattaaggtgtgaaagagaaaagttcttaaatcataaaaattatttttttatgaccaatttcttatgaaaaaatatatttgttcactttagattatagagattctatttagggaaagatcctaaactggatcatgatggtaattttggtgcgaagcatgatgacgagaatgagatcatacgagacattggatacttgtatagactcttattttaagttaatatggacttaagatggagtgttgtcttagttatcataccaatgtttgctaatttatataatgtttatggtcgaaaaatcaattatccaattgtcattacacacaggatgtgtgccctaaagaggagtgtcacacgttcaatatgaatatcttcttagtttagttgataaacttgtttctctaggaggggttatgatgtccttgaaagagattgatataggtaagaacgaacactcgattattatgatgagttatgcaaatatcacaattcgcatggtatcaaggtcccacttccatatcagttacccttaagtcggtggcttctttgtagaaactgttggcttttatgcatttaaagtgatataacccatttgtataaattggattcacacgttattattgagtataactcaagttcccataatattgagattcctctttcagaataatattaatcctgaatgaccaaaattttaatgaatttattcaatccttatttaagaaaatgaggggaataatttccaatacttttaataataatttctcttgtattcgattaaaacagtttcgtataataatattgaccaaaaaataattatgtttttgttattattgtgagacaaagaaaaaggacacatatgacgtataatataatattatcataaattaagcagggttattaactttaacgtaaaatttaaaatttagcctattaaataatttaaaaataataaacaaaattggcgaaaataattgttgagctatgaagtaattggactcaattgctaaagcccaaaaactactgactgtcaaactgtagttactgagtgacaagttagaattgtgggaattgacaaagtgcgaagtacacaacagttgatagtagctgattgtggctttttgacaaagaaggggtgaaaaaattaattatcatttggaagaattttttttataaatattatcgaatggaagtaaattgtataagatgttgcgacattaaatttttttataacagactttaaatttttttattataatcataaatatatttacaatttaagtcgtaaatatatttattatttctattttttattattattataagtcttaaatatatttacggtggagtttgatgtaaacgaattctgaatcagaaatttaagacttacccattcgataatatatttaaaagatgcccaaatgctaattatttttttttttaatcctttttgtcaaaaagcaactgattgcatctgcatctgtttgtgttcgacagaacagaatagaacaggaacctcaaacctttgtgtcgagaatcttagccatgggtagcaacggtttgaggtacgaaatcgcacaaaactcttacatcaaactcatccttcactcactcaaaaatccaacctgcgccgtcaacggcgtcttgatcggtcgcatctccgcttccaacgacgtcgtcgagatcgccgatgccgtacctctcttccactctcacatccctcttcttccccagttggagatatctctcatcatggttctccctctctctcttctctagggatttatcattttttttttccattcaattcttaccccatattgtaatttacaaaattatgcacaaagacgtatactttcttaatcaacatgcaacctaatcaactgggtttatctttttttcttctgggcatctattgattttttgtttgctttgtgttgcctgtagttttctgatttttttttaaatcaattttttgtgtgagatagatagaggaatatttttctgctaaagggttgaacatagtgggctattttcacgcgaatgagagatctgatgacagtgagcttggtggtgtggcgaagaatattggtgaccacatatgccgctactttccccaagccgccgttttattggtttgttgttgatttttttttttttttttttttgctaattttgtttttaattatctccttttgtttatcgtctttctgtttttattcaattattcgcagttagataacaagaagcttgatgctttgaaaaagagcaaggaccgtagtgccataatgcaggttagcaatttcagtactggataccgctttcatcaagatcaataatcattgtgtttatccactccatgaattgtatttgggcttctttagatgatacatttgatcaaaccatcaaatgtatagaatagaaaccattctgatctatatgaatatagaaatcctcaagggcttttgtcagtggactaaaataaccccttatttttaatgggatcatgaaaacctgtgaactcgttagaatatgtatattttctgcagtttgctgcttttgcattggacagttaggagtttgcttatgttggttggtctgactgtcttgtttttgtggcttattttggtgcatcattctctaaatttagacaaaactgctgtatctaaaaacttaactagaaatagggggctaggatttagatatgtgggtttcattggttgtaacttggatcatcttggatggctagaattcaaatttcaggcttaatgtcatgcttcaatttctcttgttttcatcatagctcataagtcagaagagaggaatattctgatagggactcagatattatgaggtacctaaatcccacctcaagtagtatgagatattcggtgaagtactcaagtggcttggttctctccccccgccaaccttttaacagctagcttttaaggcagggtttcccaagtgcttgggtgcttatcatattcctgtttgatttgccacatactgcagcatatttgggagccactcttttgggggagataatatttttgtcttttttccaaaagttctgtcaggaaagttagcaaacaaacaaacaaaaaaaaacttctctaaaataagctaaaccaaatatgtactaagatctatcctattccaagagtgggagaatgaaataataatgttgtctaacgtgcacactttgcatgattatacaggctacaacctcaaagctataaggcttcatccaaaattcgtactaattataaagattccttgtcttttgtttcttagtgttacaaatcttatggttctttcaaaaacactttttttttttgttataaaagaagaaattcattatctgcttgttatataagtatggttccaacttcctagagtttatgctatatataatatacggttcccccatatataaagtcatttttttgttagttacattaaccaagattgcctttttcttatggtttagctttatgttagggatacatctaagaactggaagttggttcagtcagatgggaacaatcgattctctctcaaagagccatcagcaaatctagtcttgttggactatattgcatccgagaagtggaatgacattgtagattttgatgaccatctcgatgacataagcaagtaagtgctttttgcttgcagtatttctttctttccatagtattttatttatctgtgcagctataactgactaagactttacataatacatattctattgttttcagggattggctaaacccagggctttttaactgatcccggcccttttgagtccatttttgcgctatttactttgcaagtggaggatattgaggcttattatggtgtatgctggattctcaatgatggacatttagggactatattttgaccctaggaaagttgcttcatgaaactttttcagttgtataagcaggatatttaccacccgttcgtaaaggattttgattgcagagcctctctctcttttattccccccttggatgtaggtatatttaagtggatttttttttactctttttttgtttgctttgtttgtgagttgtgacgaactttgttacttggtagaaacaacaaaaccatcactgccattatcttagttaatccaatggttttcttatgtttttatggttgcaacgcattctcttttcagatttatgtttttattcaaaagataaaataaaattgggctgtacatgacaaagggagtgggggacagttataaatgattacgcgggcccaaatcattgtctgaggtgattatgattaatcttctgaaaaaatgttccttttctgatcaatatgaagcgtacaagtttgagcaggattggtaagcgtgtgatatgcaagtagtagcactaggcaacaatgccaatgatggtgaggatgtttttatcaaatcggtttcccactatttcagatgtctgtggccaccgtgagtttgttgtgtttgaacatatttaattggatagaaatagaatacaacaatgatcgaagtcaaacaaatacttaatgcaaacaatttgcttgccctgctaacgtaaaacaatcagtacaagcttgttcaactttctgtttatacaatacaactcgcttaattttttttttgtcttgtacgagtatttaatttatattttataatttataagaataattattttatattatttgaattttaatatattattaactattaagtttaaattttataaatatatgttaatagatatgtcaatagataatttataagaagatatttttcttagtcaattttgttcctaaattgaacaagaaattatcagctaatattcttctcttctattgctcatgtacacaacctcaagtcctcaactgttttgcgctgatcatggcttaacattcagtacaaattcttctgccaacgactttcaagttttcaattctcaaataaaaaacccatcagtttctgaagactctcttataactgctactacgcacgataatacgtttcattctttgagtggaactgttctcttctctcactcacaccctcttcttcctttctttctgtaaaactcccttttccttaatttcttgctgatagtacaaaaaatgtttacaacaaaataccatatgatagcagacatctttgatcgaaacaacacaccataatagaactattatatgatcatgtatcatcctctattatatgcttggaagctatgttggtgatatgtcatgatagaggtgaggacttgaaaaaaactatgataaagagtacaacaaattttatgtttactaatttaagttttctatttttcttttttgttcgtatgcaatgttcattatttctctcttatttgttttccttctctctcttatttctatatatttaagatggccgtatttgactatctcaagttaaaacattatagtaactaatatatcttaacttgcaccaaaatacaccgtgttcctattatacattctattacttcaaattttattttctcatctaaattagttattttttaaaaataaaaaattgttatcgctttgtttataattcagtaatttttttaaaaataaaaaatgctatcttttgtttttaatttagttatttttgaaaaaaataaaacctgagcagtttttctttttctttttcttttttacaacaacccgagcacttcctataattatttgacttaaattaaaattcaaaacaaagaaaactcgacagtttaaaaaaaccccgaaaagagtgtaatgaagactgagaattttattttaaaaagttaatacaagagagtaatgagttgaaatttcaaaattaaaaaaattggcaatttttaaataacagtattttggaattttaaaaataaaataaaatagtcagttttcaaatattaatggtttattttatgaacaagaatagagtaacaagctaattttggaattttaaaattaaaaaataataattagttatgtcttcattcttaaaaatttagaaaacaaaactatttcattaatatcccatcgagcaattaaaaaatatgaaacaatttaacataaaatagatattaactaatattgttgtgaataaattttcaaaaaagaaatcaagaaatttatttattagattcaatttggttcctttatttttttaaatatatttaatttggccatttatttttaaaaaaattaattaagttttttatttttataaaactgatttaatttagtggtattttaaaaaaactgactgcatttgtttaaaatgtttgaagttaacaaaatgaaattagagcaaattaaattgatacataactagagttataattaaaccttttaaaaaaagattaaattataattacattagatgaatgaatggatgatggaggttagagaatacaggtcagagaagaggacatccatgagcaattacgcctggagctgtggggcatttggccaaaggacagtggtcatcagcatcttgaccccaccatattggaccaaaaacaccataattttgaagggcaaaatacagaatgacacccatgaaagcaacgccagcatctaaagcagctgagaggatgtaagtatatctagcccaccatgccttgaacttactgtaaacgtagaaattgaagaagattccaacaaatccccaagttatgtagttgacggatctggctggtgggatgccaccaccaccagcaatgattaagggcatattgatgagctcaatccacttgtggtttgggaatttgtgagcaagcagccacactggaacaggagcaagtaggccaatgaggaaaaaccaattcatcccagggtaaatcccatccttggtaaacattctctgtggtcccactactccccaaattattgaagcattgtaaaacacttcgtcaccagggcatgtccatggactaccagctggcaagtttgtttcatcacatatgtgtggaatacttgtcagaagccaccatgctgttccaaagtacacacctgaagcaactatggtacctaccaactgaacacaaaattaactatttatttgtttgtctgatcacttttgttaaggagaaaggaaacatgacaaagattgcgagttcaatgtctttggctaataaaagtaacattctaataaaactaacatttactgatttaaaaaaaaaaaaagttgtttagatcaaccatatatgcatgcatttacatcctatcatatcctatacctacctgcacaacgaacatagattttggaggaattttcatatagtggcctaatttgaagtcttgaaggaacccgagtgcttgtgacatgctgatgtacccataagtcttgaaggctacattagcaagtggccttcctgggtaaatgtacccaattattaactctgtaatcacgttgagtccgacttgctgcaaaacaagaaaaatacaaccttttgaaagccatacaaaacaaacaaggcattgttgcattttgcatgcaaaacacttttgtctacttggacaatattggacgttaccgtgtttgttgttgcctgaatgaccccaattggcaaagtgaaaactaacgcaattaccagagacattaggactccccaccatggcaattggagttgcttgccaaagccttcacaagttatcaaagatacaacgatcattagaagcaaaatgctaacaaaccaccattcaggtacttgttcatagtttctcttcataattctcgtgtgcacatctccaagttgttgtccttttagtgcagaagttgtcttcttccacatctgataaatcgttctttcaaatagatagccacaagcataaagttagatggtttattataaaaaaaaaaaaaatgggaatgtaaatttagatacactggtgaatgatattgttctgcaatcaaagttgaccaagttgtattttatcttaagaatcactgccaacctttgaattggagaatagtatcatgagtaccaatagataatacaattttataggtgttttagatattatttttcaatcagaattataatttcacctctacaattcatgttgacatttaatgaaatcttttattgcatggattatcgaggtgaaactctaaatccagttagaaaaacaacacaactatggaatatcatctaagttttatccatggtactatatttaaattatatcactaactaaacaaagcttactttccatggaagagggcaacatgggcaatagtagcagtcagagttgcaaagctcaatccatagtcgaatgcaaatgtgatactgagatagagcttgctgtaattgttataattgtccatatcaatgtcaaaagttttagcattcaaaacccgagtgacattatatgttgcgccagaggaatcaaatgtgtgagaactgatgatggggaacttcttggcatcatataggttgttccaataggaaatgggaaccagaacatacataaacagcacaaatccaaccagaatattgatgatggcaaagccaggaacagccaaaggactccccaagaagccagccaccgtgttccagtccaagccaaatgaaccaatgccaaggcctttcatgcccgaaccaatttgttgtgcagtgatggagtttttccaaaccaagcaaacaaaggagattgttgttattgcttggaaaaagtagcctggaataacgtaatatgcaaagcttgctacaaagaccaggaaaaagaattgcagccttgtgtttcctcctttaggccttttctccttttcatgaaatgccctgtcattatcacaggcagaatattccaaaattaaaagtttcatataattaatccttttcattcacatatccaaaaaaataaagacgccaaaaatcaccaaacaagaaagaatagttaaatttaaatacctaaatagagacacttgtacaaggtttgaaggccaccacatgtacggggaatctacaagacatttcctgaaaatcccagcccatccataaccaagcatctaaaaattcaacgacaaggtttagcagactaaccatattttgaaaaatgcttgttattttgattaatagccttaaaagtaaaaacaaaaacgagtttttatattcgtatatttcattttggaaaatgctctttagtgcgaaaaatatttcgtgaaaaagttaagaagagacttcaaataaatataatttaaaaaatcttttcacaacaaccccgccttgtatgattatgaatccctacttttcgtaatctaatttttaaggtgtttttcatactaaatagcattgttgtttcattttcacttttttttttctttcttctatttctctcaccatctcccgtcacatcatttatgagtttctcacttctctttttcacatcattgatgtttactatataataatgaaatggtaatgacctgggtggaaagtgctaagagaaaagcggcaagtggatggatgttcctgtggtagaaagccttaacaatagtgacaatgttgatggcataaacaccactagatccagcgctggcaaagatggtgatgagtgcatgttccttcagattgaaggggccagggttcaaggagaaagaccacttggtcaacggaacacgaattggtttggtgggaagtgttgctgccatgagtttcccaactgggagagagagaatctgtgctgagacggaggagatgtagagagggttggttctgtagccgaagaattggttcacaaaggagaggataatgcatgaggccaaccccagagtccatgttctgaatgtcagtgctggttgtgttgggtcgtcggttgttggaacggtgagcctcacttgctcaataggagactcatctacctcatcactttcatctgcaacaacaataccaacatataagattgattaaataactaattaagaaagaaaaaagaaaggaaaaagattccaaattcgatctttttttttgttaaaaaaattacgacaacaacacatacaatacaatacaatacaatacaaacttcaccgtatagctatgttgaagaagaaaaacacacgcgtacacactaaaaagcataaaaagggcaccggcatacacaaacaacaccacaaatacaaattcaacgtggctctacactcttgtctatgatcaagagagagaatatgttaataaatattcaccaacttcgataaaattacaagttttctggatgaacttgaaaaattctttattgcagatttaatttcatgaacaaactttaaaaaaaaaaaaaaaaaaaaaaaactctacattaaaccactccctttcacttggttggtgatccctcttcaacaacaacaataacacaaaaaaaccaacgagacagaattatttgttggtaccagacaatttcacgcaagcggcaaagaattatcatggacgataatgttttttgggaacatgtaatgcattttttattcaaggttcaataatttcataccaattaattcattctcatacgcccgatagtaaaaccaaataacatgttacagcatgataatcaaaataaactataatgaatgttaactcatgagtatataagacagacaagacaaggaaggaaatatgttagcaaaaatgaaggggtgttgtgttgggttatttggtgttgtaatagtaccaggtatgccaagttttgagtcgtgctgattgtcgacgaccccagccattgcaccgggatctggttcttgaaccctctctctctctttcctcgttcaggcacgcgaagacctcacgttgttggtatcattttatagggacgtgtgcactaccgagcatgccgttacagaaaacgtacatgtgtgcctggaccatttagtggtgttaatttattcatatttgacgtaagcatgatcaaatcaacaatgtatattactaaatatcacacgagataaataaggcggattttaatgttctatccttttattttagcaaatcttgtttatgactctaagagttgaccaccaaaattgattctatatgctctaaggagtaaatagaatttgactctgttctctgatctgtcttattttttttagcccttctcttatgaatgagttggcatagtagcagtttgaaataattattttctttgaaaaaatacacatgcatatttattttattagggactcatatgcacaattgatatttgatatattagtcttcaataagattaactagtacgtaattaatgaccgtgtgtattgttcagattattattgttaatttacaaaagactgttcttttcaatgaaaaatcaatttaaacctaattaatatatcaatataataaatatgtattgaaaatattctcctttcctttttattgtaattttaaatattttaaatgcggttgttttttttattcttaatgattttgttaattttgttaattttgtttgttttaagagaaaaatgtatttaataacccagaatctaaattaattattgtttgtcgtgtgggttaacgggcacaattatcaatcatgttttatactatatatatatatatatagagagagagagagagagagagagattgatgattgatatcatactagaaaatgagaatatttaactagatgtatggaaaatataaagaagggtttcataatttaatagtttttttttacataccaatactttttgatttcttattttttctccatacaaaaagcaatcttaatcttagtactaccatgcaggattcagaatttgatatctcaacagtttgtttaatttttaatgtctgtttaaagtacatctaatgaaaattaagcactacgtgcattttcataaaattaatccgaattcttttaaagatttgtaaaacggctgccaaacttgtagttttttaatattaactttcaaattttgaatgaaacttactaatctccgtaaatgtacagtgtacctgtccgaatgtaattttttaagtgaactatcagtaggccgagggggtacatatataaaatacataagcttaaattaagtttttatattaccaataaaatgagtatgtgtgagctgaatatcttatggagaaacagcagaaacaataaaatgaaaaatgacatacattacatgatgctacagtttgatttcattggtaatatgacgaagtcgatcccaaagctgagtcctctacccgctgaccttccttgccatctagctttctggaatttgtgattctctttgatgtttgttaagcgattccaaagctgttggacaagaaagaaagtggacttattcaacaatgtataatgaatggaattacaatctggtaatgaaagttagaaaagaagtacccacttggctgcattatcagatttccattcaacaccattggggtccatgccaatattaatggcagtgaactttaagatgatgcagggttcagagataagactgtctaaggaatttccattttagtgaggggagaagctatgtaccttctttcgctcgcgatgtgcataggtctctaactggttgaagtgcataggcctctaagtggttctcaaccgtcatggacaaaattacaaaaaaaaaagaagttaaaatatgtacgtgatttgttaataaatatgtgaattttaaatttattttttaataatgtttattttatttttattctttgataaaataaaacatttatttttaattttttacattttttagttcataatatattattaaattttgtgtttatttttttataatcttttttattatcggtttctctttggaaaaaaaactaataataaaaataaaaatatcaagaaataaatacaaatttactatttatcattaattaaaaaaatgtaagaaacataaataaaattattgttttatcatagacttaatgttaaaaaagtattaaaaataaatataaaatttaaatatttattagagattaaaaacttattttgaaaaaaaaaatcaataacttgaggtttttagacacctatataataaaacgaaaaaacaatgtataggtgtgtaaggatcaaattcttaatttaatcttaaatgtaaatttgacaatttaagagcgttgtttaatatttaaagtacatctaataatgattcttaataacattcataaatgatgctgacaaaaaagaatcatatatgatgagactttttttgtttttggtaaatataaattatgagacgtttttgtttatcacaataacgtattgcaaacagctggtcaaaataaatttcattttaggaattatacttttatttaatgaacaaaaacttcacgtgccaaaatgtggtataaattaaacctgcgaaaaatgtatagttgaaggaagttcacatagactttcttttacactcaacaagttcagaaaactgacatagcacgtgaatattaatacacgtgattattgatacattatcaaatgtaacgtctccagtctactaatgagaaatcgttcaatgtacgttacacccacatggattagttaggtcattacactaaaatataaatataatcatttgcccattaaattaactcaactgtctcgacgataatttttaggttaaattaattttttttactttaatctttagaacatgctatttgttggtaaggttttaaaacactcaagtttcaggtataactttagtgctttttgacttgagtccaagaacattatatgtcttgacaacaatggtcataactatctttagaacatgctatttgttggtaaggttttaaaacactcaagttgctctactgatcttcgaaccatgatggtcttccgaaatctccaaggtctcttttcagcatcttttttggtagaggtttgcgaggttttttacttattgtttctgtacaacaaattgatgagaagcttatactcttaaagaattaagatcacattaagacatgtttattttaccatttgtattcttattttcagcttgaaaatattcatgaagatgttgactgtggaagtggctggaatatgatttttgtatggtgataggtggttcggggggagctggtaaaaaataatgataagagaaaagacttatttttacagtgtgaaacttctttttttggatggcaggggtgtgaagatcttttgtgagggtggcatttaggcgaatatgtggcaggtcgtgtgtggtgtggctgttggttgagagcagtatgttatttcttctatactgcattaaatataatcagatctcaaaatgcattgtatatttctttttggtctgtcacagctgggaatttttatgtcttaattgagaccttttcttttattcaggtttttgattatttatgctcaagctagtgttatgaaaatcggaccagattaatttatgggatcgttcatgcatgtagctcgatttgagtcaatagtaggattgttcatgcatgtaacctgatttcacacgccttgaactgtcgattttgtaaaaaattggtgacccgatcaggtattacgacctagaaaggattaagtgtagttttttttttttttggaatcgtaaaatgttatctgaatatgacttgcgatcttgtatgtatttgagttgtgttatctaaatcgattttgaaaatcctccccatgttgttgcaagaccgtttctcttcaatctttcacccttttatttgcaaaaatgagatgtcgaagccgctatgaaaccgccaatttgtgttgtcgacgagaatatctttgttgttgcgtagccttattttactctacatttgcactttgatttctctagtgggtaacaatgctaagttactgtgtaatactgtaataggatagagtctagggtgccacacccaaactccttgtgcacagtgccaaagccttttcaaattcccatttcttctacttttccaaatttatccctcttcttcttttcccatcttcttcaaatctagagtgccccctttcatatgatctccatctctccacacaaattagtgccacaaccaacattgtaactatggaagaaggacgaagaaggatcttgacgacttgctcgtgaccccctatctctacgttttaagttttaagaggcattgtggaagggataagatgttgagaaaaagggagcatatgatggaaaagaccgtcgatgacgtcatttgcgatggaaggaactattctttccctggacgatgacgaggtaatcgtcgtctcaccattgatgatggttttctgattacaaagataataggtttcagatctccacatgctttcgcatcatccttgaacaagactttcgtatctacaattattttgtgtatttttgtattgatttcctagatcttaacaatgtacacattattgtatagatttgtgactgaagatctgaattaaattgcacatatgcatgcaaaaaattgcacggacgcacacaatattgcacacaggcaaattgcaaacacgcacacaagaaaacactaggaagtgagttgtattgttagggagttttatgatgtatgggaagattaattgggttagtttttctgccctttattatttcttctcggagagcctcatttccctaacatatgttcaaccctcgaccaaacactcttgagatgaatgagtcatcccacatggttccaccattttcataggttatggttgtaagaccccaaccaaacccaacttaccctaagaagatgagaaagacaatttggataacatataacaaggcaaaaatgacctttttggcaatttatcccttatatctagcatcgacataaggcttccttccttaagcatgctcttgtgaaaaaacatatgcttggagacgaaaatggggctctccagtatcttatggtcgtagcctatgaaaacgacgggggccctgtgggaaaactcatttttctcagatgtgtttggtcaagcccttaaggtaggcttaggaaatggggctctccggtaagttggatttggtcggggtcttatgatcgtagcctatgaaaacggcaggaccctgtgggatgacttgttcatctctagagtgtttggttgggggcttaacgtaggctagggaaatgggattctcatgtaagttgggtttggtccgggtcaaatcgaaatatgtcattgggtatttgaaaatgacattatctagaccaatgctaattgacttcaattgctaatggaaatgtaagtaggctcataattttagaagaagccatatgttcatgtaataatcacacactaatgagcctgtgtttgtgagtgtgcattatgttagtcgtctcatgtactatgacctgtttaatataactatatattaaaaaaattatgactcatcaacctttattaaaatgtgtcttcttgtgcaaatctttcatattaatatttttaacttgtgttaattgtgatataaagtatgactcgttattttatatatgtaaatgtatagcttacattgattctggtgcagataaaagtaagggtgttcatggctcggtttggttcgatttttaataaaaagtcatccaaaccaaacttaaaaaacacgtgattcgattggtttgattttcattaagatttatatattttcttttcaacttttaaattaaattacattaaaaattgctaataacaatctacgaaacttattaatatgttaaaccttctataataaaaatttatcaaattttcatcaattttaaaccaaacatattttaaaaaaagacgtctaaaaaaattgatatacattgtataaattcgtatacataacactacataacattgtgaaactcaaataacatatacataaaatagataacattaaagtaatataaattttatgatttggttcaattcgaatccgtttcaaaagcacaaagttcaaattgaaccaaactgtttagtttgcgaaagaaaaaacatccaaataaatttaaaaagaatcaatttctttaggtttttcggttttttatttttagtggtttttgattttttactttggaatagtttggatttgaacactcttgaataaaacacactctgaaatccagataggtgatagaatgagcagtttttctgtttcaagtgcatatgaaaggataataattttcaatattcatatagtggaggcttttggaggaaaacatggaagcttaaataccaacatatatatatatggtagcttcaaactagtgagagggtccgagtgtttattggcaaacagctcatgctagattgcctactaagaaggggatcgggttctcctttttgttttcattgtcattccttagaagaatatattttgcatgttctttgtgattgtccttcagcctttactgtttggattcatcttctggaacctgaattcataaatgtttttgatgtgtgataaattctctgtaatagaggacagagaaacctccaaagaagaataacaagagagaggaatcagacaatattcagcatttctatagctaggccaatttccttattctaatagagttgtccctctaacagaatgaccccattcactaacaaactcacataaccctcctccagaatgttctactctgtctatatcagtaatagatatattcagtctcacacagtttggcttaatactcctcttgggcctatgctggacttcctcatttttgcatttggggcacaacatcattgatcatatcagttttctttacaattggattaatcttaatcttgataattttatgggaagcaagaaagataaatgttggtctactttatgggcggttgcttgtcacaggttgtggacttggagaaataaacatgtccatgaccatgacccttcatttgtttgaccttataaacctttgggagattattacaacggcttggaaggagtaccatgcaatagtttatatcagttgcctcctgttcagcccaagagttatacaaatatcagatggattgctccatctcttggtaggagggttactctaaatacctcggtgaatgggatcaggaatgacagtggaaagtgctttggaggatttgctaggaagattggagttaattaatatcaagaatattgcggaggtcttagttattcagttttaaagtttgttaattactatcaggatccagctttcaagttcaatcttctgaaagtaatatatttgttttaaacataactacacctttggatgcgcaggtctttatatgaaaaaatattacagtacattttagtccttatagtatgaaaaccgtttataaattgatctttattatttgtgcaggttattgtgacatttgactttgtcattagacatggtgatgtatggtaagatattttagttgatttttaatttttttattaattaaaaaatttgtttgattgttagataaatatttttgtaataatttttaattttttaaaatagtattttactttttagtttctaatttttaatatatttattcaatttcatattttaaataaattataattttattattttttatcattttatatttttcaattactaatagttagttttatcatacacttgtaatttaataaactaattttaaaattttcaattgtttttaccaaatataaccatcattttttgtttttgatacttacatcatctttagctttggtctttaatggaaattttatattttttgttttgatctttatatagaaaaaaaataaatatatttttcgtcattacaattttttattttaattattgcaaaatatgttttttgatttttcatctttaaaatactttaaataacatattttttattgtttaaaatattttttactgtttaaaataaatatattttataaatattaaaatgaaagaaactataggaacaaaacgaaaaaatagatgaaaaatatatttaattaagaaaaaaatctagattttggtgtctacacttgacatatcgtcctttgttttaatttcctatattaacatttttgtggcaccgttataattttaataaactgtagatactcataatttataaacatattatgtagatactaaaatataaaatctttttatgtcggaaataaaacaacaataaaaaatgtcatatacgatgaataagtttatgatataacctagacttaagttttttttttagactagaggccctgaaaagactgtgagccacaaaatttgcttatctcccaaataagtaacaaagcaaataacatagtttagccacaaatctaatcgaagtatctgttgttcctgtagccaagtaacaacctccaatcatccctaacacacattctcgtacccgttattagacataaaagcaggatctgaatacgtgggtatccgtctgaatccaccccaattttaatagaaaaagttcgagtttatcagatttaggttcggatttttcccgataaccaaaaacagggacaggaacggatatgagattacttatacttgcctcacacccgcacctgccctgtaataaataatattaaaaaaatatatattattttgtaattttttttattgaattgattaattttgttatgtaacttttaaattatgactgcatattttgaatatgggtttgttattgtttttttgttacgtaattaacatttttgtccgattttcaataattttttattttattttaatcaaagagcgaggagggcggggaaaacctaaccccaatggggcggggatgagtatgggttttaaaacccgatggagatcggagacgggttcgaggagcgatttttgagtcggggacggggacgggaaatgcaatattcacccccgctccgcctcattgccatgcctaccccctatacctagattttagttttgacgaccactttttttatttattggtaattctaaccggcaaatttcatatatttattttggaagtcaattaacggaaatatagaactcaaaacaaattacttaagttgtacttttggagatgttctaagataacatcatatttttaataaattttttatttatttaaatgttaagtaatataaaataaaaaatttaaatatgaaccacttcaccaaattttctatatatttgtgttttatttaatggaaactctattatctatataaaccagaagaattaaattagaaccgatttacaagttttctttattttatatttaccaacgaagcctcagtttttcattatttaccagatgctgatgatctgttgactttagttaatcactatgcatatcgtgtggaagattaactccatttgtattttttttttttttaaaaaaaactcctttcgtacaaaaaaatatttaataaaattccatcctcatgattgcgatataattaattttacacaaaaataaataataaaattatttcacgtatttattttttatatatattaaatatctcttattcaaattttggttaggagtaaaaaaaaaaatagaaagaaatgcttgggaagcaaaaagaaaaagaaagacgtgaaggattaaaagttaaaaggttggggagaaggacatgacattgttgtagtgatgatggaagtgatgatatgtgagcatttgcggtattcagcactctccatcttatctatttcttcacctcgttaccatcgctctataccttcttcttcttcttcgagccttaaaccttcttcttccttttctgtgtcttgctctctcatggagaatcaggagacccacaacaaccaaggccgcagcaaattcatggactttccgttcgtttcatctgcccagaagaatcttatggttgatctcgtctcaacgcttgagaatcgctttcacactcagcttcttccttgcacactcccctctgatgttcagtattatcaaagccaaactgccactgcccaagcttctcttcatattagagcagctcataatgactccccggtaattccccctcttctttctactcccaaaatccttagtgcttgtttggattagccttaacaaaattatttttaaatgaaattgattttgtagtgatgtgatttatgtttggatgttttcattatggaatcaaattatgaataaaacttaatataaagtttttgctccaacgcaaaagcaaagttgccaattctggatcagaatcaattttgaaatcttcagatgtgaaatcaaatatgtaaaaattgatccaaaatcaattatgtaccaagaatcaattcttgtgaaaccaaacacacatttaatttcaatactaagttttcatttttttctctcttttttttttcagcccctacattgttcatgttcccttgccaattatttatcttcccaaattcgttttgacttattttttagtggcttatgggtttctaaatcaagtattggcattatcagagtattgggttgagaattaggtactcaagctactatgtccggattagatactgaagcaaatgggcaatgtataacttttgtctttttctgtgcttcaatgagtaagccatcaaatttatccctaaatttatagtatttatataaatgatccctcaatgattagaaatcatatttagtagtccttcaaatattgaaatcctttaaattgatgaatatccaatactctaagaactatttaggagagagggtaatacttgagagttgagagactaaattggtggtttactcttgctttaatttgaatagcaatggcaaagtgtaaacataaccactcggtcagcctagcaatgaggggtttgagtagtttgcaagagttcctaagatcaaatctcattactgtcattgtacataaaaaaaaaaaaaaaaaagaagaaggaaaagaataaacatacactcgaattttggggtggatatgtgtaaggagaaaaggtccaacacgaacagaaaaaagaaaaggaagagaaagtgatatacgtgattagggatgtgaatgcttggttccgttctcttgccaggtagctactgctgacatttttctccacccttttaatggatttattttgtttagaagaaaaatgatgacatttgttttgttctgaatttggtctttttttggtgtttgtctcagatagattttgtgttgggaagctgggtgcattcaaagctaccaacaggagggtccttagatataacaagtctttcagcctatcttaacagctcaactgatgcgccaaattttgtgtttgaaatgatccgcagtagtccaacaatgctagttctcattcttgatttgcctccccggaaagaccttgtgctttggccagatgacctcaaaactttctatgaggacactcaactagacaaacataggcagactctggagagagttccagaggttcaaccatacttctcttcttccctttacatccgcactgtttcctctcctacagccataatggttcgcgttctgacggaaaatggcggagtggaacgcatggaggatatcatcagggaccatttggaccccatttccaagcaagtgttggggatctggttggatcattgtgcttgtgccaagcgagaggtgggagaggcagaaagagcttatctgaaaaaaagggatggtctcattagaaacaagaccattgagattgatcttggttcaagctttcccagattgtttggtccagaagtagcaaaccgggtactggaagctatcaaggagtactttactgtctgaaatgcaaatttatttggaattgttggatattctatgtattacatccatgtacctaatttgctgtgtaatccaatgaggcctccgtattttctgaatctctctaatcaagtataaaatccgtaaatgattatgatggtttctactttctcccccattattgtctgtgtatcagtaatcagttctctgcttatatatatatatatatatatatatatatatatatatatactaggtatgattcatatgacagtagcacttatctaattgcatctggttcggtttcaaactctttgaaggagtagagttgccaaacgccacgattaacttcctgaacaagtaggaaaattcttgaattggaagttttttagcatgcttgagagttgagagaagctggtgaaatctgaagtctggacctaaaataggtcaagtgccattcgacatgatttctataaaagaaatgttatatggctcgcttatgatctactttttacgtagctagtgccatttttttaaccaatatttggacacatagtgccatcatatttttaacattgcttacttgcgtttaaattcgttgaaaatgtataaaagttaaattttcattaattcacctcgcttatcataaaaaagaaaggtacatctggcaactcataataaaaattatttggttcgttaattctagaaatgttatgcactccctattaaaaaacttttagctcaaacacagtaaattctggcatcatagttttgacattgagaaacagtaagaaagaagggtcatcaatatttgattcacgatcagcatcagatactgtaaagcacatatataagttgcatggcgaatatcatatactatatgtacgacttatattttcagcgtataataggattcctcacatgttaattagctcaaagctaatcagtatacctactccacaatctttttcaccatatataaagattaaaagccttttaatgattcttggtgatatattttcttttgatattggattcttagtgatattatacctaagaaacccaaatctcaaattaataacgtaaacacgaagcgaaatatgataatggttgctcttggagaaaagagtttccattagaaaggcccaaaatgaacttcatggcagcaatacgtgcatggaaacagaaggcacgaaaaagctcttggagagttgccatatatacggttctagttcctatgaatgagagaaagaaaagtaatgcttattcaaatgtcctctcaaatgcaaacacccaaggacttgtggttgaatttgattggtcaagagtgacatatagttagcaccaagcaatttttgtaactgacacgaaccttttgtttatgataattaagagtttgaaaccattggcaaataagtaataactttgccatgtggttagaggtttttaacataatttcttgtgtattgaaaaacaatgaattaaccctttaaatgatattggtatttcaagacattgttactattcatgaatcttcgaatcatattttctagaaacgagtaaaatctatttgattgattgattataaaaacatttacataaatttcttaaaacttgaaggattacgtgatatttttatagttattttaattatttaccatttaataagaataatataatatttttattataataaaagaaaatctaagctcgggaaaataagattctcacctccatgagaaagtttttgtgaaaaataatttcctgaaatcttattttcttaaaacaaataccaagcacaagaaactaaggtagtgcttaatttgagtgtttttttgttttcatttttaaagaaaacaaaaaataagagtaaatgcatttgtttaaaacaaaaaatattttaaaaaataagcccacaactgacaataacttatcaacatttttaatttttttatgaagaaatgaaaacaaaaaataaatccttaaccaaaataccacctaagatttgcaatctaagattcttagaaaacttaaaacttttttcctaccaaatgaatctttagttaaaaaggagtttgaaatcatttttttctggctaataatttaggtgaattgaataccaggattcatagagtcatacaggtttcaaacataaaaaaatatttacaaaaatatttatatattatttatcaatagaaccctcacatcaacaacaaaaattaaatttatattcttttaaaatataaattcgtttgttatcgattggacgaatctttattggtagtttgaaaccatttttacttatactagagtaaattttgcttatgataattagaagtgtgataaaagaatgagacggggcatgaagatttttaaacatgagaaaataaaataatataattgaaagtgacatctcaacaaatgtagaaaacatttgacgtgacaatgttacatatgaataaataaataaataataggttgaaatagtatgaggtaataagcacaaacaattggaggtacaattttttccctgaactttattgtgaattccatataattgttacatgaacttttttctttcttatgtaaatttcatataagacattacgtttgcggattttttaacttatccatttttattcaaggtgagacttatgcatgcgtgtgactgtgtgaataacactgaggcagtacatattctgatattcttctttcggcagccacaccatatcatttcgttattcggtatatattaaagtgaagtgaatctctctttttaaacaagtgaacttgataatgctgaactatcaaggcatcgatccttaacatggaaaaaacttgtcaatttggcatcatctatcactgtcttaattacatctgcagagtttttcttttctctcttactttcgttttgcattattagtgagcatctctattcttaaccaccgaaaacttcaagcaaaaggaaaaaggttatcgtatatatatatctaatgaaaattaagcactacttgcgttttcataaaataaatccacattcttttccatcttttaaagattcggaaaacaactaccaaactttcaaattttaaatgaaacttcctaatctccgtatatgtaccatatataagcttaaattaagtttttatattattccgttgcacatatattaagctattacctatacaaatagaaacgtccccaaagtccaaacaatcatttattttcctttcctttccgtgtttgtatttatttaacagtttcttaattattatttttttataatgacgatcactcagttcagttcagaattcatagggaagttgcatctaagtccaagaaacttgcatgcttcgtgaagtggacaaaacaaagccagattttatacctttttgtatttcacatgctattgttcattttaaatttttgtggacagtagcttcataaaggagtttgaaagatcattatttcaaaccctagtcacaggttgtcctcaaaacttctcatccagttagtttcagagtttcaatctagtgtcaccacagagataaacagcaacatgtgtattactaatcaggaagctatcaagcagttgcagtcccttatggaaaactgtaagcatttagcatacacttttctgctaatagtgttttgttagtgaccaatatcttctattctttccatgttttttttaatatgtttttctctcgatgtagtggatgagcaacagaagaacacattccaggtttggctcttcagtctcttggttttacttgatcttaagttttgagaaagataatgacaaaaagaatcagtggaagttataacttgatgaatgtatctgttcatcttggataaaataagtcgccacaatttatatttatattttaaaaatttcagttggggtgggagttttgaaccaaaaaattaaaattttgcttctaaattgatcttgatgaccagtacctcgccgttggctagaattctttactgaagcacagctgcgaacattatgataatagatgttgatcatcatgagtgtttcctttattctgtcatgaaagcttgctctttacatttcagattatgcaccggggcaatccaacagaaacattagtacggtttctcaaagcaagggatgggaatgttgtcaaagcacataaaatggttagattgtgtgcagtaaaagttttttgttggaaattttcccaaattgattgcttatagagttatcattggatatgaacactttgctgacggttttaactataacagttaattgattgtttacaatggagagtggaaaatgagattgataatgttttatcggtgagttcctttactgtgcatattattgattttggaacaacatatcttaaagcagttaagcattatgtgacagatggagatacggatgcatgttttctttctttttatattttggggggagggggatgaattcacagtatcatgtcagtgtgtcaaggaccaaactttagagataccgagataaagatgcatgttattgcaaaaagtataaaataaacctagttatcactatcactggagaatgaaatttacatggtctctgtagttatttgatcatatcacacttctagcataaactagatgtctatcatatttctcaatcattgtgaattcatgatcataaaagtctatcattgtttaaattttccttcttttttgtgttaacagaagcctataccccctgatttgtacagacgtttgcgagattctcaacttgtaggaatgtctggtttctcaaaggaggtataagttttcatctcaggcataaatttattttattttcctcctacccagctaccctcatggttcttctctgcctctaacctgtatgaatgaatgatgtgtaagagatgacatctttgtgtacgactgtataaacatagcagatgatcaacaagatgtcatctcttacataaagtaacatgcatgattgctaatttattttatttttggctgagttatgccagggcctacctgtcattgctgttggtgttgggctcagcacatttgatgaagtgtttgtaaggactacataccatctctaagccatattatccttatacattggtgctgcagtgttcagtgctgcttatctgtccattttcctttgtagcatgtgaactactttattatttttcatgatgttaaattgccagttatttttgttcaggacaaatattatgtacagtcgcacatccaaatgaacgaatatcgggatcgagtgatgttggtgagtatctagagtgtctttttttgtccctcataaattctctgacaccctgattgtttattggaatttttattgcagccaaaagctacaaagaatcatggacgatacattggcacttgtgtgaaagtcttggatatgactggtttaaaactctcggcactgagccaattgaaggtatgccagtaacttaaaaacttcttatttctctttctcttcatgtttttaatcatatgaccgttccttgattggccatttattgaagtttttctcttctcactctatctatccactagatgatctcctagttgacactttctgtttggccaccttcagcttttgacagctatatctacaatagacgacttgaactatccagaaaagacagacgcatattacatcgttaatgttccatatgtattctcagcgtgttggaaggtttgtgccagtttttatgttgaaggagttcatacggatctatcaaaatcttgacaattacagctaaactcttcaatgacaatggcaggttgtaaagcctcttttgcaagaaagaacaaggaggaaagttcacgtactgaaaggttgtggcatggaggaattactgaaggtaaacattagcatacccctcgtacagtatatcttttatgagttttccttttagttctcttgactaaattaaagtcatattgtccattgttcttgttaataattaacctgtgatatggatggagacttgaaaaagagtactaccgaattgaatttacttcattcttactagaatttgttgcaactgcgagggtttgacatacttaacaatttgaacaggtaatggactatgcatccctccctcatttttgcagaaagaaggattcgagggtgccccgacatcatgtagctggaaatagtgaaaattgtttctcctttgatcatgtcttccataaacaactctataattacatcacgcagcaagctatattcatagagtccttattaccaatcggacaggattcgttccatgtagacttgccagagccagacccagatgatgccaaaattgccaagactatagaaactgagttccacaaaattattattatagattaaataacaaaatgaaatatgactcaaaaaaacttggaggattggattatgtctgcagtgacctgcagttactttcaaactgcaggcaattctggtcctatcgagttacttgttctttgcagttgttatattcagttattggatgtaatgtaatatacgggtattacatcaagttgccacaaacttctgggtgaataacttttaatctaatttttataacccctggacgatgagcaagtaaattcgttcagtcttggaagaatgacatcaagttacagttttttctttccccgtcaattaatggtatggtatttatacaaaaatgtagaactacagtgttcagaaccgtgcctgccagacagtattatgcatggaactaagaatagaacagttggagaaaatatattttcctcatgttgtgacttatgagcactattatcctgcaacaaaaattttcctttttatatcaaatatatcaagcctaggataaaaaaaaggccatgccgttataaactacactacaacttattttctcaattatattcatgattcctccttttcttgacaaaacttagggctagcattaacctgaatatctttgcatacggtggtattttctattcattttggaaaattattcatcaatcaggtgctagatgatttcattttctgttcccaatatgggtaagagactctctgaaggtgctgcattcttttatatgaaagttcaggcaagactatcgtcatttgtcacctatgcgccacacaattctaggattaactagcaagttcgaggaacacaaaaagctttacattaaattgtaaaaggttacaaatcaaatcctacctaaacaaagtgttaaaatattaaatttgattactctgtggctttacattaaattgtaaaaggttacaaatcaaatcctacctaaacaaagtgttaaaatattaaatttgattactctgtggctaaggtttcttatatgtacaaaaataagctaactggcatattataagtgcctcagccaataatactctacaagcactaaagcgcacacatcctcactcgtttcccagcatgttcagtaaggactgatctaaagaagaactgcactaatattggacatgaagctaatatccagatatagtaaaggcttaaggcttgttttatcttggtgacttgttggtcatgggttcgaatctgaaaacagtctctttgcatatgcaaggataagactgcgtacaatatctctcccccttacctgcgcatagcgtagagcctccaggtaatggagtacgtagttttttttttttttttttttttatagtaaaggcttaagttatctaaaccacttaataatgctgccaaagttgatttctcttatctcaattgtttgtaagagttataggcaatggcaactgatacagcagcacagaaaacagcaagagctgcataagtatcttcttgctcccagccattgagccaagttgccatggacggaaacttgcacgaagctcctttgccattattgatcctattgatccaagaaatcactgtctcactgctcttattatcagctgagagctttgcctctgattcaatgacatcagggtccattcttctttccaataacacgtgattctgacggaaaaaagagtctccattagattggcagcagccaactccatttgattggcagcagctaactccatttgattggcagcagcttacagaattgtcttgagctctacacccttgagtgctgtcttctaagtttctcaagtcattcagcagaagccgctgttcttgctttttcttctgttcatctactgataaacccatctgacccctgaaggcaatataaaaaaagtaacatatacaagtaagcatatgttccatggacctactatgctccaaagttttcataaccatcagcctgatacataaccatggaaaggatttcagcatgtcaatttccgaagagggaatctgtcacccaatgcatcaaattttttccatcgcaaaaaagggggcagaaagaaatgtacttgaaaagtaatggttgaagctaggtttctgaaaatttagagaaagagtagggaataacattacaataggagttaattgtatgtggctaagtccatggtttggaatttataattttaatttgtgaataaaaagcttaaacagtcaacaaccaaactggtaggtcacagatgccatttaaaggcatatgaagcaaagctgtatatcttcagataaagggtatgaagatgccacttcttgcctgaccacaatttcaatttgaaaatttacagaagcctagctatatagtcttttataggatgaaacttaaagatgtaacctttaagccaaaacattaaagaagataaataaagcattacaggaaataattacctccataatggatctaaaatctccccctttatgatatggtgttgaagcaatgaaggtacatcatccggggtaacatagccatacctgcatattttaattgaggagaatatcaatcagttacataatcaaacatattaaccaatggtacaatggtattgcatgatttaaaacaataaataaaaatttctgtaactgaaagtagcagttttagtaaccattaaggtgttctccttaccagtggccagtgacttctccattcatgctaggtccaaatacaatgacatttccagcatactgacttgctccaatgtgtgaacatgggcttacaaagacttttccttgaagaccatgcaactctatctcctccctgaatctactgaccaagacaggtccacaaaccccacatctgcgatcacgggatccatgcgaacacacgaaaacatacgaacctctcaacacctcaggcgttccgggaagccattccccatccttcacaagaacctcctcaacaaacgtttcaacatcaaaatgcgttaatctcctgcaattccactaaaacctgttgtccacaatgatctaagaagcggaaaaaaagggaatcaataacagagaacctttaagatcaatactctcacctgtatctaaccatgtcaggaaagatcaacacatccccattagatgtctcagtcccatcatgaccctcacatatcgttaaccgaatctagtaaagagagaactcataagtccaacacaatgtaagatgaagcaacattttcaccagatattcaattaactaactctttaacacatacctcgaacagtgatatagccaaaacagcgtatataagtggacataacgcttgctaatatcaattaccttaaacagcgtacacacaaacaaaatccaaaagcaaggggcggtagagtatagtatagtacctccttttccatgtgactcttccttgcgacaacggcggcatggagcaacctcggcaagcgatcgaactcggcggcttctatgcgcggtggccagacgcgagggttcttgtagcaaaggaagacgtggcgtcggtagaactcgacggtgccggcaagggggctctgccggaaatcgggtcgggagaaaccgaagtcgggatcgtcggcggcgacgtctccggcagagagaaggccgtcgttctggaagcttccggaggcgcttctggggtcggcgaggtaactgtcgagttggtcggagacggtgatgggagaagaatgggaagaggaagaagggattgtgaatgtcagcgattcttctctctctctgttactcgccatagtagcagaacacaaccaatctctctctctctctctctctctctctctctaacaaagtaacaactttgtgtgagtgagtctgtctgtgctgtgcttctaattcaatagttcctatttcgaggggtttgatgatgttggaggaggttgcgttcctgtgaggttgcgactaggatttttcggtggaatcgggtcgtgcatcaattatgtaacacgtgtcattcatggcttctttgttttcttgatggtgccaactcacgacgatccaatctaatgcccaaaccttcggcattcctggatctactgatttcggggattctgtagagttgtctacaaattattaactgcaaccttcatgcaaagaaaagaaagaaatacaaaaattgttataagagaaagaatttataataacaggatttacaaaaatgtttattataatggattttttttaatttttggtttattagcttatgtatttgatagatagcataaaaaatttgattttttcttaagaagtattgttgtatttataattatttgaaaacaaatgttatataatttttttattctcagtataatattttttttaaaaaaattgttttatccctaactgcaattttttttttggtttaaagaattattattagattatctttcttgcgattcagtgcttttactggaggcctaatgttcttacatgttcatcttattacctaaatacaaatgtgcccatctaatagatgatattattatttattgtttggcgtgacttcgggtgagtaaataaatgggttccacctgaacccgaacccgacataatcaaacttaaaaaaatgaatttgggtggatttagacggttcatagataagcgggttttaaattcgatcccaaatgatttttgacaatcgaatttaggttcacaatttttaatatatcgatatccgacttgactcaatattaaaagtttaatttcaattttttaaccttttagctatttaatttcaattaaagagcccaatacaaaattcacattaaataacaaaaaaaaaatgataaaatatgacttgacaatatggcccaatacaaatgaataaattaagtaaaaatttgaaagaaaataaattaagtccaaagtgtcttgacccaatattggtccaacccgtttggactcaaccgtaacccgtccaacctgaaggcaaaaaacagtcagaattggacctttttgtaatttatcagatggacccgaattactggacatttgatcggtacatgacaccaatgtgttcagtcttccaaacatgcaaagaatttataatctaaatcattttcaataatcttattttaattttccttagtctttgccctattattacaaataaattatttttcacttgatattatgagggtttcgttggtcctcttcttttgtcaaattatcttattatctaatctaatgaaaaatatatattctatggtgctttaatgtaaatttgttacctgttttctaggaaaaacagcttgaagcaacatctcatttttgcctcagtaatacagtttgccaaaaagagaaatcctaaccatgcctttttattagcatttcataaagcatcaaataagcaatgtaaaaagagtaataacaattgttttattagcatttcataaagagcatcaaataattgagaagaatggacagataaaggtatggtttttttaatagttattatcatcattacagtgaatgccgtaaaatagttcatcatactacctcatgaagtagcaatatacaataatatactaaagtttcattaataaaatacttgtgaccaaactattgacaaaaatctgatcgcattggtctcaactttcacaaaaaccagtgtgtatctctcacattcatgagccgcacaaaactgtaactaggcaagagacatttcatacaggattcttcctgggaagctaagaagaagaacctccctcaacatggttccttttcctgtgaaagatgccactgatactaggcaagagaactttctttgaaactgacaccttccctttttctaacttcatctccaccttgtttggaggtgaattctgcatttgaatcctatagtgctgtggagaaagttctggggacatcagtgtttcagccaatattcgagatgcagcttctgctgctttcttctgctcttgttcgcgccactttctgagctcaccctccaccgccctctttgctgcttcagccatttcagcccttttcaacgctgcctgtgtttcagtcttcatatcctcaatttccttttgggtttcctctaacctttttagaaattcattttcactagcctttgcaacttcaacctgtgctgtggcagcagccacttttatgtctgctaatttatcagactcctcaacctttttaactaagcattcaaactcctctcttgagattgtaattcttgcaccaggttcagaagttgatgaataagaaggactagtcctcatagataaaaccttaatctgatcaagagcacttgcctctgctgctttagctgcttccacttcttccaacactactttaagctttgtttctgcatcttctaacacaagtttagtgactgcagcttccatcttcaattctgctgcctcattcttcataccttctgtttccctttttgcattttcagtttcagacaacaactgttttaatgtcaagatcatttcctctgatgcacctctagctttagattcttctgccaagtaggcttcgagtttagactcgcttttccggagctctaccctcagattctcgacaacagattcagttttggattctttctccttcaattcagagtgttctctttttgcattctccagctccatcctaagagcttccaccatgcttctaagggagtcttcctgtcctactactttctgcagtgattccttagcatcaccaagctccagagtgacacttttcaaagagtccaagtctgatgtctttttatgttcaatttgcttttgcagaaccacaatttcagtcattgtctcggtcagctgcacttcaagatttttggtaagctctggattgaattccttctttaaatcaagcaacttcttttttgattcttcaagggtggcttcatatgattgtcttggaactttttgcttggctaatgtctcttcttgaagttgatgtgcttggacagattcagcattcattttctcaactgattcctgtacagccaaaatttctttagatagctcacatgctttttcggtgtttgccttcattgcatcttcagcttctgctgcttgcttgagagcagaaactcttgctttcaaggataaatcatacccctgacgaattttactcagttcttgcttttcaacatcaagttctgtaatgacagaagcataattattaagggcagtttctaactcttctttccaagcaccattggttccaccaggatcaccacatttttcttcaagctgttttgctttattttttgaagcttctgttgcctgaattgctgattctctggattcaccgagaactttaagcttttgtgagagatcctcaaccactcttttagccttttcaagctccaccaggacttgagccttggtagtttctgcattctttagttgttcctttaattttttcaggtctttctgggctaagtgaagttgtctcacctttgcccaaacactctaatgaaataacaaaccatagaaacaattttcacttatgtggtaaatgagagcatgtcattcatgaatatgatacatgttaacaaggacatgtcattggcaactgaattaaagcatgatactggattgtgttgaacaattgtcaaattttgaagtccaaattataacaatatagaagattttgaactaataagaataaaagtttccaatttttttcacatttcaccccactcaaaactttttccatcagaacacgtggtgcaaacacaaatttagattcatagtaacctctacaccaattctaggaatgagttttacactaaaactattggtccattataattttgtctttttgatatgcaacttcagaattcagatatagttttaaaattacggtataaaaacagttacctcagcaaaatacgattttgccttcttaatgggagcattgggaggtgtttcaccagagaaagcaccttcgccaaatagagaaacagcatctttaacagattgaaaaggtggactggtgtcaatctctccaaccactggttttgtgggatttggagagttagcagcactttgcctgattttggctaccatattgtcttttatttaaataatattaacggcctttgaagccaacctgcaaaaaaaaaaaaatgttacagtatgaatatgatcaacacaacacattgtaaacatcaaactcaatacaatcacacatatcagagattcttttcaaatccacacaaaaagcaaccaccaagtagcctattcagacattttaacaaaaccccatcaacaaaaccacatcaaagtttccatctttagctgaatccacaagaaaaatcacctacaaatatcaaaaagagtaggaaaaaaaaaactttcaaagaggtgcttcttgaaaattttcatgagaagggaaagtgtgacattgaattgcagagtgaaatcgcgacgaagaatgttcacataattgtgaggagggaaagaaagaaagagagagagagagagagagagagagagagagagagagagatgagtttggttgaagtgaaaattgcgaaaaggtgcggtgtgtttaaagacaaattttgcatcagcatgtcagtttcagactcaagagtttaaaagggaataatcatgtgcaacttgttcctattcaagattcctctaattcagttataatggttttaagatcatatatgttatccgtagcactatgcaattgtgacttgtgaaaattctgtcagaataaaagttgcagtaaagatggttcgccacgtcaccaccaccctcccttcacaatgaacaaaggaaattttttatttaatttatttaaaaaaaaatgagagtgacggtgatgtaaatcagcaagaaggcaaaggacaagctctcttgtcctttttcaacaatgtgtctcgaacatgaacatttgctagcaattatttgggacactcatgcttcatgcttcatacttcggttgcccatatacatcctcttcaacggtgatatcgagtagtagtaattcaaatctaatgcataaatatgtattatacctatacgggtaataaataattttcctctaaaaaaggggtaataaataatttatcgcatcgtgatttgattgtatagaaccgaggcacggatttgcacagggttactatttttattttttaagtttgttatctgatttaattaattataaaccacccgggttgatctagtgatagaaagtttagaataattttcatgatatcctaagttcaaatatcagtgagatctttgtagattaatttaattaattacggattgagattgtttggcatcggattccacttacaaaatttgagacatgaaaaaaagttacacttatatgaagtttctaattctctggttcattattgttcataggagaatgatttgttaatgtattggggccgaaacctcagaaaataacatggcaggtatatataagtcgccttctattgtctgaatggtgggacttggataagtctgcttgacctacaaatggattggagtgggcattgggcagctactaagtatttaaaggcccattatacttaatgcttttgctttcaaatccttttgttatggttattttctacttccacacctacatttcactatcaagtgaggaggatatgcccaaaatttgtactagtctatatagaaacgtgtataaatcacgatagttttagttggctttattatctttttacggtctatttaaaagaaagaaatcattatttaaattattttaagataattatattaaaagccaacaaatttatcatatattataaattatgatgagatgattgtgtaaatttttttacagggtataatcttttttcttaacaaaatacattttaaaaacttttgaagattttggaccatgaaaaaagttaattattttaaaaaataaatatttgagtagcttttttaaaaaatatattttttaaataatttccaatttattttaaaaaactgaaaactaaaaacaattttaagttatttctatttttactctttagcaaaatacaaattttacaaaaagataattataggtatttttgcatacacatccatagactaatattcaaatatttgtctttatgtacgtacctctgtttaatttgatatcgagaaaaaaaaaaaaaaagagtttggagaaagggataaatagaattttcttcattaatttaaatgagagaaaaaaggataaaaggatacaaaagagaaatattcattttttttcctttaaagagaagtgaaaaccaaggagggaaaatggaatcattgtttgcatgagagtaaggcagtgatataattaaagggttgaagttgaggtgaggcagatatactgtcgaaataccgtgatagtatctgctgcatgatcattataattgtcaactcaatcaagtaagctacgctgtcgcgcgctcgctgcatagatcatgattaatagctgcatgcccatcattatcaatatttctctattaattgattagggtatgttaccagtaaacgagtgagtaattaatgatgattcattgtaaatgatcagtgtcgttaatgcaaccaagacgattcttcaataaataaaaaaataaaaaaatagctaagtattacattaatttccaactgggttaacattaagcatatatgaaactacaagataatactatctccacctctgtgatttacttctcctttctaccaatctgctccataagcaagagaatcatctctcttgtaattaattaaatttcccacactagctctaagttaattgaagtctgattaacgggttttgagattgatcttaaatcccatatataccctcaagaattcatcatagctgctagttaactagatatttgtatcatgcagactccatattattgtggactttatatagagagagatctgaaatgtcatattgggagtaaatgaaaagcatatccagtagtacaggtaactgaaattgttgtaagatcaaataataggcataggtagtgttgcagtatatattcatatatactactgaaactagtacccagcagggaattatgtttccacttaaaaagagctagtaattaaccacacagggaaccaaatctgacagaaggatgtcataaacaaatatcagttttgtggtgcgttttataagaatgcatgttaaatagttagtgaaactttcgagtcaacttgtggattccaacactttacatttcttggattactaattgggctttcgaattaaatttgatacatctctcatgttttatacaattatcttctttactgaatgaaacccaaaataacttagtctgatatatacagagcagatggcaagaaaaaagaagaaaaaaatggagaatgactagctaggaaaaacaattgcgattgtcattgtacatgccacaaaaacataagacaactcagttcttaataaagcatccaatcaaattaaaacatccaacatagctacaaatgggatggaagttgctggacattcaaaatgcacaacagaaaaaagaagcctaaattttcatgacgaaaattcgtagtttttcttaatcgaattcaggtgacatatttcattttttttttttaattttctattttatgataaggctccaatgaatcagactttatcatcattagtattatcatattactaaagttatatttttattattattttcacctataacttacgtacattaaaaaggctatagcttatcataaagatttatttttctcactcataatgtcttagtattattatgacttattattttgatgtaattaattattttattctagttgaatgtcttcttaaggctcaacctttgggattttttgttttgtttttggtacattcaacctttgggctttaaaagaatattatcttagtgttaagtctttagtactacgatgttactgttggtcccaataaaattactcctagtccctatcagtcaaagacaattatcaaactacccttctccacctcaccccaccccaccccacccttcccaaccccaccttgcactcatgctgccatgcttcttttttttttttttttttcgtggtcaaacgtaattatactttcgttgtgaaattttgcacaacgaaatcacaattttgttatttttggtgttgttggtgcacgacgaaatcattattccctttggggctttaaaagaatactaccttagtgtcaagtctttagttatagggtgttattattggcccaaccaaaattgctattggacccaacaaaatttctcttggcccctatcaaccaaagacaattaacaaactacccttccccacctcaccccaccccacacttcccaacccctccttgcactcacgctgccaagtatttttttttttgtggtaaaacgaaattatacttccattgcaaaatttcgcacaacgaaatcacaaattccttatttccgtagttgttgatgcacgacgaagccatgattccgttgtgcaacaacaatccgttgcacaaaggaatcatgattttgctatatgaaatttcacactttcattgtacattttttctctccgaaagaatactaaacgaaagtgtgacttcgttgtacaatggaatcacactttcgtaatactgtcatgttttaaccttccttgcacaacgaatcatgattttgttgtgtatttttttcctccctgaaaaatattacgacatcatatttttgttgcacaaaaggaagcgtaaattctatgcgcaatagaatcataattttgttgtgcataaaattcacacccccttttgtgcagcaaaaacacgataccataatactttttggagaagagtaatcttggaattttgatgaattataggaatcaatcgcaactaccttagttattagtatttcaactaaaactcatttggaaatgatcctcctcaatgcatgtgtgtaagagggaaatggacatgtaaagagaaagaagaaaaaaaagaaattgagtccatacactaagctgtatttgtttaaacgttgagttcaattgaatgagaaataatatttttggataaatagtcattttcgtccctaaacgtgtaaagtcttgacaaatttgtccccgaaagatgaaaattcaaattttaatccccgaaaatgaaaaaagtgcgacaaatctatccatccgttaacttctgttcgttaccgttaatgaaagagcctacgtgacgcatttagagacgaatttgtctattgctctgaaatttctaatatgacagtaccgtacccaaaatatgagactcaaataaaaatgtatagccattaagttaatccttacaaaaaatgagactcaacttgattttgtcactgcctaatgttgtcacaataaaaattttaaagtaacagaaaaattatgtttattaatcaatgttatgcttattattatgtttgttttcctattttttaagtgtttattgtaatattatgtttgcaacgattaataaagggagaaagatgaagattaaattgtattttggataaatagtcatttttgtccctgaatatgtagaatgttgataaattcgttactgaatgtgtcaattatgtctttcattaacaataacaaatgaaagttaacatgtagatgaatttgtcgcacttttttcatttttgaggactagaatttgaatatggataaatagttatttttgtccctgaatgtatagagcatcgataatgaaagactacaacttccttccccgtaccaagaggctagagcatactggcacgttcgatcccttccttgcattccaactgaaacattctatcagctaggaagttaagttatttttttgacaagatatttaaattagtttttaatttttttattaattaaaaaacatgttcaataaacaaattttcttaatagtttctaatgttttttgaaatattatttaaagtaacattttttaaaatattactttctagtttttatattttctttcatttttatcctcattagatttatctaattttttaattaccctttttaaaataaatcatgattttattatttttcatcattttatacttttcaactactttagcaattaatttatcaaatacttataatttaataaattaattttttaattaacaactaatttttcaattttcaattaacttttcaaaataattttacctaacataaccataatcaatccaaaatttcaaggcaatatttttttttaacacagtgccaatatattgcatagaaatacaaaactggggggtgcaagattaatgaggataaaagagaaatgagagcatggttgaaattgaagcatgcaaatgcaatgcaaggaatgagacaagaagaaaaaacaagatcccctccctcttacatgcacttgctaaaacaaaacaaaaatgccagacaactgaagggttacatcgcttgtacacaaagcctcacgcatttttaaaaattttttatttataaaaataacaaataaatttgttgaaaatatcatttattcattaatcattagcaaaaaaatatttttcatataactttttttcattcccatccaaacaagcggagagaaatttctttactattttctttcttatttatctattcaaacaacacaatttactcctaaactaaacaaagtataagtgagaggaggggagtaagtggtaaattcattctgctacacgctattattgtatatttgtattaatataaaagtttatatacaaataaaaaatataaaagattatattgtgtcttgcaccagatgaaaaatttaataataaataattaaatagtaataatagtctataattaattcccaagtataagttttagatatcaaatctaaccaaattttctatatctggttcttattgaatttaattgtcatacacgatgaatgtatatatataacaaatttatattgttatctaataaaaaattatgattgcatgacgtttaatataattattatgagaattaataaatttatcatatataactcatattaaaagacaatgtaaacttacatcgtcaacatagttttttttatcttttttatttcagtaagtttttgaattgttcatactattgacttgaccaatttccaatttaaaacgatacatgtgaagtgagtccgtttttcatagaaaaaggttacattcacaaacatatacaatagataaaatgacattttctgtatgttttttctcttcattttcttgatttacggaagattcaaagcactatgaatgaatgaccaaatcataatctgcgactgttattgactttatatattcaaaatacaaattggtacgtagtttaaaatcgacccatatgtcaatttgatccctctatatatagagagaaagagacattataaattaatattagcaattaaacttgtatatatacttatattatgcttataataattttttgtagaatacaaaattaactaatataataattgaatcattggatattatcattttgatcatctatgttacatttcacatatattatatattttttagtgttttatctagtaagtagatatttacttatattttataacagataacacgtgaaaataaaatagtgtgataaaataatattaactacattttatttagatttacttgaaattttataaactggtttaaaatatatatcggttagttatcaaaaatattttcttagaaaatagagtactacttaatgtgagtacatatgtgtagtattatttgaatatatgtatcacacatgagtgttgtcttttttatttaatttggtaatcactgtaattagagacttaaactctccaataatacctaagatatttttataaatttcagttctttaaaccaattataaaaataagttttgataagacttaatcatatttaaaattacattcatgctgacatagtggtaataggcatatcttaacgcatgtaccaatgtgtgataaataaaaaacactattcttagtaaaaaataattctagtagtattacaaccaatcaattaaagacactattaacgataagttgaatttaaagaattatttatgaaagtttatatattaaatcttaataagtacactcccgtagtaatactttcgaaaattctccaccacgttttgtccattttgtggaaacatattttattgaaattttattaaaaataatatctggcctgtataagatgataagaatacgtgaagaatattaatttcttatgaacaattatatttggaaaccttgctattgagttccatagaacaattttgagttcgagttctaatttacatttgggttattaaatgtgcagaggaaaactttaatcaccgaatggtcatatatattctaataaaacctctactatttctttatcttgctaaatgtcaaataacatataacaagttattaattacaaactcgtaagttgacataataatctaaaattacaaactcccataattattttgaccatgttttgtcattttgcggaatcatgtttgattttattttttgttaaacataatatctgcccagtgacaagtataagatgataagaatacgtgagcaccgatattttgagtaaatgattatttttatttttatatgtataaagtgttaataaatttatttttgatagataaaaatttaaattttagtcttgaaagtaaaaaatgtgataaatttatctattcgtcaatcattattaatgaaagaatctatgtgatacatagagacaaaaatgattaccaacatgattgctaaatagattggatcaaaatgtgaggaagtttttattggattaatttgttagatctcaaatttcgtttcatttaaaggtaaaatataatttaatcttcatctttcttcatatttttttttatcattgcaagcacaacattataataaatattttaaaaaataagaaaacaaatataaattagaacaaatataattataagcataatatatattgattaattagcagaatttgtcttttgatttgaaatttctattatgatagtattaggtagtgaaaaaaattaagttatgtctcatttttttataagaattaacttaatgattgtataattttgtttgaatttcatattttggataaatatattatcacattagaaattttagagcaacaaacgtctaatttatgtttgtttttctatttttaaatatttattgtaatattatgatttcaacgataaaaaatgggaaagataaatattaaattatatttttacccttaaatgaaacaaaatttgggttcgatgaattagtccaatgaaaacttataacattttggttcaatttatttagcaatcatgttaacaattattttgtgacatttttgtctttatgtgtcagataagctctttcattaacattaattaacgaaaattaacatattaatgaatttgtcatacttttttttactttcaaactaaaatttaaattttcatctttcaaaaaataaatttatcgatattaagaaaaagactatttacgatgatatttttattattcggtccgcgatgtgaataaataacattaatagtccataccatatgtaattgtccatctccctttccacacagcacaaacacagaatctcgtgagaaagaagctgggagacagaatgagagaggaagaaggtgcgagacaacaagagtccgatgttgatgttagtttgttcgagacaaaagaagcaagattccgaggagtttacaaggtatttgcatcaacaatatttgcagctatatgttttatttgggtgtacagagtggcaaacatccccacagttaaaagtgggaagtgggcttggattagtgttatggtgtcagagttgtgttttggattgtactggatcatcactcaatctgttcgttggagaatccttcaccaaacgcctttcaaacacaggctctcacaaaggttactttttcttcatcctctccttttactttttcatttttttcatgtccaggggaaaatattaaacatacacatacgtatagtgcttttttgcttacattatttatctcatttattgatttctctcacttgcttcatttccactcgtacaccttaaaattggacgaataaaaaaaaattatattctgtgagcaatatttataaagttaaaataacttggactgttggtgtaaaaaaatttacactgttaattatgataaatttttgttaatataattattaagataatttttataaagttaataaatttatcatttatatatatatatatatctatggtgaaaatatttatattatacattgaattatatattacatttcacatcatgagaagcatttgtatatttacacatgtgtatggagtacattaaaagaaaaaaattaaagatttgtggggacaattacccccaaagtataccaagtatatctgtcctgacatgtgcaagtatagaaggtggaatagtgtagggaaaatgaagcatagaaaaaaatgaaaatcgtgataactactataataagaagtatataaaataagttagaatatatatatatatatatatatatatatatatatatatattatcctttgagaatgacgatcaaactgaatccttgcaagatgcactcaccacactgtggtgacttcaatgattgtttttctccctctctctcaataatattgtttctaagagttcattcaatgtagtgaaaagaaatgaaataaaaagaaattgataaaaaaatttaaattaaaataatacaaaaatataggtctcgtattttttttctcactttgtatatttctctacgtacaaatgaacgaacctaaatgtctttcattcttaactagaactagaagtatttcattttcaactatataagtctattttcttaatttgatattcatttaacaaaaaaagtgaaaggaacatggaccgctgaattaaatatactcattagctaaatcacattaagagccactgcaaaaaaggctaatggaatcacgctcaatactactactttacactctttcgacttttcaaataaatcccatcaatagccagtaagaaacaagcgaaaagtctaacggagtagtatcgtaaaccaattaccaaataaattaaagacctaaagactaaacattgcattgccagtcaactttttatactgtttcattccctccagtggtcctatattccatttcacaaatattttgtgaacataaatataattaagtataatattaattttgtacgttggaataatgtgattctttccggaatccatatctgcggcttctatttatttatattttatacataagaaaattatattattcgagtatagtgtgaccgaaaataaattgacggatgatgacttatcctagttaggtttcagcttttgcatcatttttggctgtatataggatgtgtgcatcgccgactgtactaagtaactttgtaattagttctggtcagggtgtaagcggattgggtggcaaatccgtaaaattcaatttaatctattttttattattattttaaattaaattattggattgcatttattttatttcagtaaatctaattaaaattaaatttgatagtaagttttgaattttagattcaatcatagatcaatctaactcatatgtaattaaattactaatataaaaattttaaattgaacatattttattatttattttaagataatacactattttataaatagtagtttgatcatacatttttttcttgtttattgtatcaatagtataatatttttaataatgatttctaaagatatctttactattttattaaaaaaaacattcttactatttttgggttttgagaatttttttaaatatgacaatttttttatgatctaattcgataattaacctaatccaattaaattaaagttgaattgagttgaaaaaaagaagataaatccaatttaatcaaatccaattgagtttgattggattgaattgaaaaattgattttttatcaatttaacataggtcacttccagtactcttagttgtaggattaaacatgtttttggtttttctttataaaattttaaattataactttggtttttataaaattttaatttattttttgctagtctcttctctatttaattttataaacattttcagtttttgttgataaatgagaagtgtgtttcgtgtcagtatgtttaatagttatatatcactatatagacaccttgcgtgatctagtagtcatgtgatgttcatatctatctattaacagattgtatgatacgaaatcacatggcaattaatgtgatgacgtacggcgcatacaacttattaatttaatctattcttatttgactaattttagtcattttaaatatataatctattcttcagttattttcacattcaactaactaaatcattatataattttttattcttttttataagacattttgaacataatcatatataatcattaacttattatgaataatattaaaatttaagaataatacatattactattaataaaaaaatattaatacttagaatatttaaataaaagtaactagtattagaaaaaaagtattgcttagaaattataaatatcttataaaaaatcatcaattctcctaaatgatgtgttataataaggaatatagaaaatatgtcacatcatagtatcatccataccattattgaaattagtggtgaaggtggaaatgtcaaaatctctattgcattctctctaacgccctatagactatagtaactaatagagttccaatacttcgaactctgattaaacaaccttcacaaactttggaaataaagtcttggagatatatatatatatatatatatatatatatatatatatatatatatatggatttctttgttataattaatgagtttcaaacttgatatttttctttaattattacatgatgcatgtcagttatatataataaggcaaagttaagtagagttgttccagacttgaattagagctcaatgtatgttggatatttgagtgtgtgtcttattaaattttattttttcaagtaattgttatacgtaaaatagtaaaaatatgatgaatattttttggcatgtctttacagatatgacgaggagaatttaccagcagtggacatttttgtgtgcacggctgaccccatacttgagcctccatgtatgacgattaacacggtattatcagcaatggcatacaattatcctgcgaataaattgagtgtgtatctctctgacgatggaggctcagagctaacattttatgctctcttaaaggcttccattttctccaaacattggttacctttctgtagaagattcaatgttgaacctaggtcaccagaggttttcttcgctgccccaacttgtagcaataataccactgagtatgtccaagcatggttatttatcaaggtaactgactttttttttttttacgttgaattatcgatggttatatatgtccatatagtgctgtcttcaaatgttactaatattgttcgggcacggtgtgcttgtgatcacatgaaaattcttggagttgaacaattgatgtttttaattcaaaggtttgttatacggaaaggaatgcattagaaaaaaaaacaagtattaaataaattaatgaatgtatatttaacatttgaaaggtaacaattagttaactaattagtgcaggtaatagatatatagatacaatgagctgagcgcatagatcaattgaaataagttattttagtttaatcagatgtcttaaatttgtattttatatgggatctataaaaaaatatatatctaattctcttaaataaaatgttaaatttgagttttatatatgaattcaaaatttcaaaattaggttactgaatatttttaactcaaataagattgtctcatatgtgaaaaatatatatacaatattaacaaaaaaaagtaatttttattaataaatattaattattaatttttgttagtgaaaaaattcaaattcaaattcaatacaaatacgttacttgttatttgtttgttttctatataatcagtttttaaaataaaaagttaaatacatatcttattgttttttctttaatttgttttgcctgattctgtaaatgttactcatttatacgaattaagacataaaaagtgagatttcattctttgatgaaaaatttccccattttccatttcatatatgtcagaaattatacgaagacatgaaaaatgagattgaatcagctgtagcaaggggcaaggttccagataatgtgaggaatcagcacaaaggattctcagaatggaatccaaaaacaacaaaacaggatcaccaacctatcgtgagggtatggacatttttaattttcacaaaagaataagaattcacgttggaattaatctactatcttagttttctatataactaatttttcaatataatctttattcttcattttattagataataattgacggaagagacacaaatgctgtagatgaagacagatttcaactgccaagagtcgtatacatggcacgcgaaaaaagacccaactaccctcaccacttcaaagctggagctgttaatgcactggtgagtaatactcacagcaatacattaacagtgtatgctaattaaactcataaatttatattttacttgtaaaaatgtatttcgttttaatttaaaagaattaaatcttaccttacaatttacaaatgcaagctaacaatatttataaaaaaaagttaattaactctttatctaatatatttttttcacttaaagtgtcttaatactttaattagatattaccctaagctttgcagttaagctaaggttttttttttttttttttttgaaatagttaggctaaagataagaaccttgaaaattaaaccctttttaagtttttttattattatatcttagtatactatgttttccactcactttataaacttgtcttttgtacattgatgatgatattttcaaattgttcattcaaagacgtatttgactatgtttttccaataacaacaaacaaaaaagaaggaaaattctctattattatttggtgttagtgtcacatgtcaaaagtttcattctgcagataagagtgtcatccgagataagcaacgcccctttcattctcaacttggattgtgatatgtactccaataatgcaaatacaattcaagaaatactatgcttcttcttggatgaaacaaaaggccacgatatagcttatgtgcaatttccacagagctataataacatcaccaagaatgaccattatgcaaattcttatcttgtgagcagtaaggtaaataataaaataatgtaattactttatagtttatacagtatacatatatataaactcacacataaggatggaccaacagtatattgagtctgattttcttaatatgtgcatataaagtttgagctagctggcatatgtggatatggagcagccttattttgtggaactgggtgtttacatcgaagagaaagtctatcaggagcttacttgatagattacaaagcaaaacgggacctgaagcctaaaagaaatgataatagaacaattgatgaattgaatgaagcatcgaaggctcttgccacttgcacctatgaggagggaactcaatgggggaaagaggtttgcgctcatgtgtagattttaatttatctcagaaatttcaatatttaataatatatatgaatcttgcagaagggattagtatatggtattcccgtggaagacatagctactggccttgtaatctcatgcaggggttggaaatcgatttattacaacccagaaaggaaggcttttgtgggcatagctccaacaaccttggatgtagcatgtcttcaacatatgaggtggtcagaaggcatgttccaagttttcttctccaagtattgccctttcatttatgggcatgggaagatacactttggtgtacaaatgggatattgcaattaccttttatgggcccctatgtctctgcctactctctgttatgtctttgtttctcctatttgcctacttcatggcattccactgttcccacaggttatctcatgcgtttaattagcttgatttgattgcttaattttcttgcacttatttacctctaattcgtgtttttgcagctttcaagcatatgggtccttccatttgcatatgcatttcttgctacatatggctttagcttgtgtgagtatttgatttgtgggtccacggcaaagggttggtggaacttgcaaagaattaaattcatccataggaccacctcgtatctctttggtttcattgacaccatgaaaaagcaattaggactgtcacagacaaaatttgtcatcacggataaagtggttactaaggatgtccaaaagaggtatgagcaagaggtcattgaatttggaggctcttcaatcatgttaaccatattagctacagtggcattgctaaatctttttggtctcgtttggggaatgaagaggattatgatggatttggaattcagctctagccaattgatgatgcagattacactgagttcattggtcgtaatgatcagtttaccagtgtatgaggcacttttcattcgtagtgataaaggttgcataccatcttcagttatgctcaagtccattgtcttggcttcattagcctgttgcctagcacctttcatttgctaatctagttaaatgtcaaagtacaatactgaaagtgtggttcatacttactagtgataagaatctttcttagttcctagtttggcttcattgacttgaagcttcaagtatgtgcgctaattatctttattagagtactttggtttcatgtatctaaacatacatctagccactattatttgttcatggaaaccggacattgagattcccaatatttgatttacaagaaatactagcaatgcacatttcaatattatatatttgacatactcccttctgttagggaaattcatgagacccacgaattatgtatgtctgcttcttcgtacaatagatattgttttcaaattggtatgattttaggaatttcaactaataaaaaaaatgagtcgaaaaaaggtgttagataatatatatttgggttaattagacatacacttctttatatatttttatactaatatgtttaatttctacattttaagatttacctaattaaatttaacgtccaggcactatatatttggtaataacaattattttttgttacataactatttgtttcattttgttcgtaaaattaatatttaaattattaaatatacttaaaacatgttctaaactaattataataataagttttatattaaacatacggactttttgacgaaaatgagaattttggagaaaggaaatatgcaaacggattcttttaagaagtattttcatgtttcagacattcattcattttccaagtcttagcaaaaaaagtaatttctgcatgtcaattgtatgtaattagaatatatatatatatatatatatattattgaagttatatttataattatgtaaaaagtaatttttatatcgattacaaatataaccgatgaaacatcttttacatcaattatatatataatttatgtaaaaagtaaaaaatgctaatatttgaagacatgatactagcggataagtagtgtctaaaacaaccctattatcattgtaaatacttctaaaaacaatccctttccatatttacttttgtcaaaatctcattctcgttaaaaagtcaaacatatatcactgatgaaatagagaaattcttgcttattctatgagtaaggtatttttcttgttctgtaccatttattatataacatgtaaataatatggatcattattgtcttctatattaatgagtctttttaattcttctaaaatattaaccatagttaattttaatttttctaaataactacactaaagcaaaaattttctcttgaaggtgttatgggtgttgatataaaattcataaaattaaatatattttaaaaaatttatttaaaaaagagaaattgatatattttaaaaaaatcatccaaacaaataaaaaaaattggttgcattttttatttttttagtagtttttgatttttactttagataggtttacatttaaacaccccaaaaaaataagaaaaaacaaaagtataataaagatatttttgtaaccaactcataactatttagtttcaatcatgaatataatattacattgtattatgatgagagaaaaaattacagtataaatctgctattaataatgaacacgtatttattggaaaaggtaaaaggttgcaaaaattatttggggactagtgacgcataatcataagttttatattggaaaattttaatcttccatttaaatatgacgttaaacaagttataaataatgaatttgataaaatttaaatactaatttttgtcaagttaaagttttctatcatcataatacaaagtaagatcatattcatgattgaaactaaatagttatgagttggttacaaaaatatcttttaagttattatacttttattttttcttatttttttggggtgtttaaatgtaaacctatccaaagtaaaaatcaaaaactgctaaaaaaaataaaaatgcaaccaatttttttatttgtttggatgatttttttaaaaatattaatttctcttttttaaataaattttttagaatatatattaattttatgaattttatatcaacaccttcaggaaaattcttgttttagtgtagttatttgaaaaaattaaaattaattatgattaatattttaaaagaattaaaaagactcattaatatagaagataataataacccacattgtttacatattacatagtaaatagtacagagcaagaaaaatatcttggtcatgaaggaagcaagaatttctcaatatgaaataattaattttgatagtaagcggtgggtacaaaatagtaaagatttaaatatattttaaatttataaatagagtttggcggttagctttgtttttagcattcttttttgtttcttggcaatatatatatatatatatcgtggctatatgtgctgtcaatgggttagtcagtacatttgtgatcacccttttagcttagcttggagtgttgtactgtcaatgcaacacccatcacacaatataagaaatatcaatgaataacatattgctccattgcaaaaaatttaaatataagaaaaaaaattaaccgactgcaagtgcaacaagaacactggatagaaaacttgaaggtaatggagagtggtgaagactattcactgtttgagactaggaaagacaaaggaaggcacattcgaaggatctatgcaatctctttgtttgtggccatatgcttcatctgggctttcaggttgagccacatacccgcatatggcaaatgggcttggcttggtttgtttgctgcagagctctggtccggcttctattggctctttggtcaagccctccgctggaacatgctgttcagaaaaaccttcatcaatagactctatgaaaggttcaagttcgatctacacctttaatttgttcccgtgtttaagaaaacatttttttgattttttttttaaaattattaaaattgtttttttttaatttgttacaaatatttgtgtatgttttaatatctagaaaaattagaaattacaagtaattatatattactacccaatccaattacttaggattggagtatttataaatcaaattttaacctgttaacctaaacaatcacttaaattcagttggttgagcattatatatgatgaattattgtaaatttcctctataatgtgtgtgttttaatttgtgatagatatgagagtagcttgccgagagtggacatttttgtcttcacggcagacccaatcattgagccacccatgatggtgattaatacagtgttatctgtgatggcttatgactatccagcagagaagctgagtgtgtatctctcggatgatgcaggctcagacataactttttatgctcttttagaggcttctacctttgccaagcattggatgccattctgcaagagatttaaggtggaaccgaggtcacctgctgcttattttaacacccttgtctcaacaaattcacacgaccataaccatgccaaagacttagatgccatcaaggtgcggagtaatcactttttttttttttttttttttgttcatgtcacttgttgccaatggaaatccctaaatttgatctaaatcttgctattgttatgtacataaggtttgactaaattaatcaagccttttatacaaattaactaattatttaaaatttcaaattgtttggaggtggttgaccttggtttttatttataatgatacccttgttaattagacatatataattttggttataaatgacaatctcattaattcacaacttttttgtaattaagttccatttaagtatctaagttgcatttttttttagaataaaaagttgtataacaagaatatgtcatgagataaattttaaaaaattaaataaattggtttgcatactctaattattttgtgaaggttgcctattttcttctcacaacagtgtgcttttattttgtggtagaaactatacgaagatatgaaaagacgaatagaagatgtagtcaagttgggtggagtacccagcgaagcaagatcaaagcataatgggttttctcaatgggattcgtattcttctcgacatgatcacgatacaatccttcaggtgaattatactttctcaacattttctataagtatatatttgagagaattatatatcgacatgtgtataaaattgttaaacaacttttgttaaaaagatattgtcgttctttacacaagaatgtaagttgtcgtgactcacaggaaaaaaaaaatctgcacagtaactcttagcatacttagctttatttagttaagtttgggagaagttaattagctatataagttagttaaaacttatttgaatacaagactagaagtgtttatgagagtttttctattggaaacctaagtgtccaacttatagcctcattgtatataagcttgtaataactcttctgtaactaacaaatcataatacaattgatcattcaccacttactctcaatttctggtttcttcttcctcaagttattgcttcttcactcttcactttcagttgaacttcatgagtaacaaaactactcgtaaaaggaattacacagaattatattaagaacatatttttcaattaatctatgcaccacattgtttttcaaatttataccatatgaagttcacatttttgtcaataattttgaactcaattcggctcatgagttttgtgttgtcctatatataagtttgatgcatggtttgctcttgtggcttgattttcttaccagatactacttcatgaaaggaactcgcacaattcgaaggatgtagatgggtttgttttgccaactctggtgtatatggctcgtgagaagagacctcaatatcatcacaactacaaagctggagctataaattcattggtagtgtatataattaaaacccgcctctattttttatttaaagaatttaggatgaagaatagtacctcaattcatgttagaaaaatctttcaacttaaaaagtatttataaggaacttaattacatttacttcacctaaaaaattgatcgaatagaagtttaagcctactactgggtatatgtaaaactgtcttaatctactcaatgaatctcttgtggttaaaacatatacagtttcatacgacttaaaaatagcaaacaagtaacatggtgcttattatttattatttacaaaaggaggttcacaaaaaaaataccactgtatatatgagccgtaagtggttgaatcattcttgcgatcttttgcgttatagattatagattatttacattggcacacatcgtcaacgatctaattaatcacccatgtgcatgagtgtgtctatatatgctgcctaattatgtgtgtgagtaactttttatggatcatttgtcaatccatgtggattaaagataacattcttttcattgacctaaatgtagctaagagtctcttcaacgattagcaacgcgaaaatcattctaattatagattgtgacatgtactcaaaccattcacaatcagtgagagatgctctttgttttttcatggacgaagagaaaggccaagaaattgcttttgtgcagtttccacaaaattttgagaacctcagtaagaatgatttgtacgggaatgctatatcagcaattgtggaggtgagttagataatattgatggaatggaatactgtttttccagaaagattaaattcttccatttgcattacccctgtttctatttgatttcatttgtagatagactttggagtataactattatatatatttgtctatttgttttatagatagacttttgagtataactattatatatatatatatatatatatatatatatatatatttcaatttgaaatgtacataattttagtgaaaagaatatatctgttgtgatttctttaatttagacataactaatagctattaataatgtccactaattatttaaatgcttaaatatggttttatttctaataaatatcgattttttgtgtttatttctcaataaatttttgttttacattgagtgtttgataaaataaaatttttaccttttgtcccttacacttattttagtatgataaattagcaaattttatatttgttacctaataatttttatttatttattattagttgagactaaaacgaaatttgttaatttattagggaacaaatataatttttttttaaaattctttaatttaccatagacgaggacaaaaaacaagtgttatttttattagaaattcaacataaaacaaatatttattagaaaacaaacacaaaaataagatatttattaaaaataaaaaacatatttaagtcttatttaaaaataataatttcacatttatcacgaccactatgaaggtggagctccatggtgcggatggttatggtggccctttgtttattggaacttgttgctttcatagaagagacgctctatgtgggaagaagttcaattgtcaatacaaaaatgattgggatgatgagaatgagaaagaggtgattaaagcaaacttgcatgaactagaagtggaatcgaaggcactagcaagctgctcctatgaggaaaatactctatggggaaaagaggttgtttactttgatctttctctctctgttttcaaaatcacaaacacccccaaaagccaataataatattaatagatgagtatatatacattaaagtacaataatgaataatttgaagtgtgtataacttatttctttgtagattggtgcaatatatggatgtcttgtggaggacgtgataacagggttgtggatacattcacaaggatggaaatcaatatattacaacccagcaaggagggctttttttggaatagctccaactaacttgcttcacacactagttcaacagaagagatggggtgaaggcgacttccaaattttgttttctaagtacagtcctacatgctatggtgatggaaagatcaatttaggcctattaatgggatattggcactttaactatttggcaaccacttgtttgccaatactatattactccatcatcccttcactttatctccttaaaggcattcccttgtttccaaaggtaataatgacctccctttttctaagagaatatataagagatttgcaacattttattctctcccaaactccttatcaaatataaatatacattataaattactctaaatttatattattttggagttgtcaatagatatgattctataaattattttttttacatctttcagaatttcatagaattttttttattaaccatttgatttcaaaattgtttttttattccaataaaaaaataatagaaaaataaaatttaacgttaaaccaaatctcaattattttatttactctaaatttaatttaatgttctttttctattattttattttactcattgttaaaccaaatcttatgttaaaaaaaacatttttttgccacttaaattgataagaattagtggcctattagaggccgtttcatttaatcgagttttaaaaggccttagttttttttttctgaaatttttctttgcttgagtcttttttttttaattatatttttttcccgtcaatttctctattttgttcaaagtacaaatttttcctttgatatggactttcatatcttattatcatttttctatcgtcaaatgttaatttagttaaaaatatgtcggcagagattagaaccagcgttctcttccccctctcttttcctttcatctttaaattcttccttctcaattattaggttaaccttaaatctcccttattatcatttgtgtgttagtccttattgaaaaatgtaacagaatagattaatggatttttaatttaagtagtctgtttatttgtaaatattttgatactttaggcttatagtccttttacttatacattcttttatttagttttaattcacgaatgtgagacttgttttctaataattgatatgagtatgaaatcgaaatgaaaaaaacttttcaacgaactaagtaactttccctaaaccatagatatgttacctttgaatgaccatctgataattaggttttactacgtaatatacctagacacatacatgtgtgtgtatatgtataatttttttcttctctaaatgaatcttttgtgttgagaatgcaactaacattttgtgcttaatatgtgggttaaacagatgtctagctcatggttcatacctttcgcatatgtaatactcggggagagttcttctactttgattgagggtttaatttttggaggcacaatccagggttggtggaatggcttgaggatgtggttgtacataagaacaagttcttacctttttgctttaatagacattgtcttgaaattctttggacgttcatattcatcctttgctgtcacaactaagattatagaagatgatgtttcccaacgttacaagaacgaggtcatggagtttggaacctcttctccatttttcactgtactaacaacacttgcattactccatttgttttgcttactagccactttaaaagagttagtcctttgcagagttgctttaactggtgagaaaatggcattgcaagttctattgtgtgggtttttggttctcatcaatttcccaatataccaaggccttttcttaaggaaggacaagggcagattgcctagctctcatactattaaatctactacactggctttaagtgcatgcatcttcttcaaaatatggaattaagtatattaaggtagtctctgcttttaccttttgattggatttttttacaatcacaatgtagtattgttttggtggaatgttagctttcaaatgataaacaatgtacttgtggtgtttttagttggaaaagaaaggaattttattgttttccaatgattttatttttataatttaatggatatgcactgttaatgtatacaaaaaattactttgtcaacaaatcaaaaatcacttttggtatgacttttaaagttgttatagtaagagttaataaatttatcatgtatgattatttgtaatttatgactagatgacatcataaaattgtttgcattattagtgcataattcattttctcttatttttataacatttgtaacagggtattgaagctggtgagagtgattgccaatataaaatggatgagtcatgaacaaggagtgactcttggaagataaaaaagatcattaacaaaaaaaacacatggatgaaatgaatatacattggaattagaaaaatctaaaagttgtgcaactataagactatgtggttaaacatgacttaaatgaattgattaatattacatatattaacaaaatatatattttttgataatttatcatttaagaattttataattaagtatacttgatttggagcaatttttatatgagtaacctttgaaaagttttccatgatacatgtaacaggggtcaaagcatgcaaaaaaaaaattgtgttgattaattgggatattgattaatccggaaagaaattaggcattccaagactatattcttgtcaaaatataatattatatcaaccattttctcaatataaggaagaaacaaagttaagtttttcgtatctcatttcacttatcttaagctagtttagaagcatttaacacccctaagtttgtaaattaccgtctcagttttctagagtctggttatttctagttttatttttttttaaaaactaataattcaaatatttttttttttttatagacaatggcgttaatgaaaattgaaaattcttatattacatttttttactacaaatcatattaataacttaacctttaatttttttgttatgaaacttaatctttcaataaaaaagaatattaaaattttaaaatgttacaacattgttcgttttgtttgttttttcgttaataatctatatgtaagttatgctagtggttaaatcgaacaagtaaatacttgaacaaaggtcccctaatctatatttatattgattgataatgtaaaaaaaatataaaagtacacacacacacatatatatatatataatatgttttaatttttagataattttgaattattataatttattattttatttccaagatcaatattttgtgaaaaattaaaattttaatatttaacaccttgttcatattataatttgaaacaaaaaaaaatattcaagaaagaataacaataaaaaatgcctaactatattattttttaagattaaataaattttgggtcactcaaactattttatactctgatttttattctcttcaaatttatttcagataactaatttcagtccctaaaaaattatgtgttcattttaatttcttgtttatttttaatattcaaaactattccttgagaggatctaaaattgagaagaaaatgcaaaaacttaatctcatgggtcaattttaagcaataaaaataaaaaaaatgactaaaaatagataattttttttttaaaaagaaaataaaactagtcgtctgaaattagataggactgcaaaattttaagaggtactaaaaataaaatttaaaatagtttatggacaaaaaaatataaacaacgtgtaacaagcaaatctctataccagatagcaaaatgcaaggcccaaaagggagcaccttttgccccctaacaataaaccacttttatatatttggataagagtttgttttctttactcttccatctccatgttgcaaactcacataattcatctactaccctcaactcctatacttgagaattcgttggaagaaactagttacttataaacatgttttctgttgaatcttttacacaagagcaaccatgactatgactccgcaggaggaccttgtatgcaacaaaaccattttttctgaaaatcaaatgaacgttattcatgagaggggaaatgtaaatacaaaaaaaaaaaaaaaatcaaacaaattataggttcaacaaattatccctatactacatcaactaactatagagacaaaaattagatagttcattcaacactactagcagacatctagataaaggttcctcaaaccttttgaatgcatattgaatgaactatactaatcatctagatatcgaatgaaccttttagcagacatccagtcatctagatgcaaacatattaattgaatacatattgaatacaaaaatcagactatactaatcctcaataaagagatcaataaaagtatcatatttggttacaacataaaggttgtaattgaatcattgttgccatatgggtctttggatccacctaactttttaatcaaggacaatgttagcatcgtgtgtgtgtgtgtgtatatatatatatatatatatatatatatataggtagctcaggcaatcattctactgtttcttcattcttttgaaacataaatacattattaaccaagaaaagaaaaataagcatgtaaatgcgcgaatatcttacactttgtgttttgcttgaatctaacggaggtcttgtacgaggattattaacctttgcaggtgaatcaggtttgccacctgtctttttctcatttctagctttgttgaaaatcaccgtgtaaccttcagctgaagctggatcattcacatcccattcaccaaactttggtagtggtcgacccgtgtcctgagggttattcagatttgtttgtttaaaatataattaaactgaaaagccttatatgtgaataaacttgatatgttacatacttttttatcctaaaagtcagacaatcaaataagatcatgttaccaaaatcaagaaatggaaaacaagtttaattatatacgtgaccgtagaatgaaacaaaattattgtgaaatatgattcatggatataaggagcaaaattgaaatgaacaagcaacatgaatgagcaatcatagggaacaaattaaatgatcagaagtaattcatagaaatttgagatagtaagagaaaaatgacacacaccgacatgaatacaatgttggaagattttccggcggggggaaaatgagtgaggaaaaggaggagaaaatttagaaagagagagggcgttttaaagaaaatgaaagaattttggcgtttatatatatatgtaacgtgttgaacggaaatcaatgtgcggtggtgtagggagagactaaagaatgtgtgttgaaaaaagtaacgatgtggaatgggaaaggaaggaagaaatcaatgacgacgcatccacatgggcttactattggaaggtggaacgtctcttgaatgtcataaattgatttgattaatgttaacaaaaggttatttatttatataataattaatttggttacgtttataaatggtattttttatataattaattcaattttgattaaaaaatatcaattactattaaaaatgataaattatattacaattaattttattgctttaatggtaacttgcaattaaaattaaagatatattggattaagattttaaattcaatgaataagaaatgatggagtttggataaaaaaaattaaaatcaacataatttttttaatcttttaataactaaattgattataactttatgttctcgtattaattcttattgcaattttctcatttttcacttttggatttgaacaatagatttaagatttaaaattatatatgttgattttcttattttttttaatataattactacaagtacttgatgataaatttaatgacatatttaaatgggataaaagggagtgatgcggatgaaaaacttgtaggagggttactagttatgtgaatgataaaattaagagtgacactcaggaaagcattgcgagcatgtgatggacatagttaggtaagaaaatcatggttaatcttatcacaaaagataaacattaatttagaaagcaaatgaaaaagtgtggaggaaaagagtatgtttgacatttttttattccagaaaaataacataaacatatatgacacacacatcttgaagaatattaaagagagaataatatatgtgtaatgagagaaaagaaagtcagataaccaatagaaaaaaaaagagtctaacaaaatcttaaggatttgggtgagattgttttatactaaaaagtatgataaattctttttaaaaataattcatcaaaaattgtatatttttgaataccaaaagactttttataagttataaacaatcttaattgaataccattggattttgtagcctttattgaaaaatcttaaaagtcttaattgaatatttctatacttatttatacaatttaaaaatcttgattaaataccacaagatttttttattaaaaaaaaatcttttgaaatctcaattcagtacatctctttaattaaaatgggatgtaaaaaagtatataacggaaacatgattccattacgtattttttatgaaataacaatgaaatcatgtttctattgtgtattttttacaccctttcacacaaagaaaatatgattttgttgtgttgtgttatttgtggtaaaaaaatacaaagaatcacaattgtatattgtataatgcaagtgaaaatatataggggcaaaaaaattaattaattgcactttaaataaaaaattatgaaaataatgtagtttccaaagtatatacaaatgtatagcagtcaatcacgtcccaggcagacgtgttcaaacacgtccacacaggacgtgacccagcaccaatcacgtccatacaagaagtgactcaggaggtgacgacacgtgtcattttgagacacgtgtcattttgcggcgcgatgcataaaaacttcggaaggtcataacttttgactggaatgtccgatcgaggcgaaactggtggtcacgcactcaaaatcgagacgagaagccgctagcaagtcgcaaaggagatttgctcaaaatttttcccaaaagaggcctctaagtacctcaaaattgtgattttatcttcgatgacccaaaaaatttcttgttttctatttttcttttattcaattattgaattacatgctattttttatttttctaattacttctcttatttttgagcattttgacataaaatccgcttccatcggacatttctatcaaaatttatgattattcgaagtttatatgcatcaccaattttaccgtataattttgttcaactgttgaaagtagtgttgcgactacaatattgtcattttttaatttgttaaaccgaaatcatttaaaaatctacaatataattttggtaaataaatataccaaaaaaatagtagggtgtgataggaatgtccgttggaggcggattttgtgtcagaatgctcgaaaataagagaagtaattagacaaataaaaaatatcatgcaattcaataattgaataaaaaaaattagaaaacaagaaatttttttgtcatcgaagataaaatcgcaattttgaggcacctagaggcctcttttgggaataaattttgagcaagttttcgagcgcgtggccaccagtttcgcctcgatcgaacattccagtcaaaagttatgaccttccgaagtttttatgcatcgcgcctcaaaatgacacgtatcgccacctcttaagtcacgtcctgtatggatgtgattggtgctgggtcatgtcctgtgtggacgtgtttgaacacgtctgcttgggacgtgattaactgctatacatttataatactttggaaactatactatttttgtaattttttatttaaattgcaattaattaatttttttgccaaaatataggtttaaatatgttttttatttctaatatatatcctaattttgtcttttattcctgataaattttatcttcgaatatgtattttttttttcttttgtaacttaagtgataatgttatcagttatctaaaataaaacttttaaatataaaaaataatatgaaattttttattaggaatcaaatacagataaatattaagaataaaaaatatatttaaactaatatatatacaatagaattatgcatataatatacgacgaaattttattttcgtgaatatagaaattttggaaataaaaaagaaattactcacgtgtagtttaaatagtactgtgattatgacagtgaaaataatattttccctctaaattgattttaaaatcaatttagctattgtgacaagcagtggtttctttttctccaacccagttaaacattcactagatagctcctttgcagctcgtttagtactagatttgtagaatgaaattccaggaagtaattctctgtggctctatccccaattacgtgacattcaaattcaatgaaaaatgaagaggctgcttatgagttgcggctattctattctgtctctccaattcatcatgctttgaaatcaagcatttaccttcagtgagatactgcatttccagaacagacattttgattactctccacagaaaagatttatatgagattgtcagcaagttctatttcaccaggaactttggaaggatgatgaattgatgacattaaaataagcaaagatacgagaagattaaactgtaaagttccgaatggaatgtccaagcttctaagatttctccaacttaatacatattctgatgcagctttaagaaattcctttaagtgtaatgttcagcagctgtttacagggaatgctgtttatactgttatgctgctaattacagtttgtttataacgattagaggaatggaaaatctaggaccttgaattttagagttaatagctgatcttagtccgtaattgttgaagttgcacagcaaaggctggttatgaatgcaagttagaagcgatatgctattgtgggaaaaatattctgttaaggtttaaaaaacatgtttactttcgtttaattggccgagtccttactttcgtttttgtcttggcttttttagtatatgatagtaaacagtaatgtaatcttcaagcgatttgtttctggttactttgggccttcctgcgtagtttatataatgtaagtgatatctaaattattagaaattagttctaagttactgaaagcaataaatcaattgttcccgtgaacccagttgtaatactactcaattgaatactagattggacatttaatcatctgattagcttctaatgtatttttttataaaaaaaaattaccgtaaagttttctatagtgaatagtatattaacaccttttctgctgaaaagtgttatttttataattgaaagtcaatgaaattaatgtttctatgcataaatatcactaaaatggatttttttatctttttctcaacaaagtcttttttaaatacacaattagggaatcaaatgtctatcaatatgcttatggaacataggtatctactaactgggttggatcttcttggtcatattaacaccttagagaaatggtatcaatgcttgtcatcagttgttccatagaagatgaagataagcataaagcaacagttaaccgtggttgcatatacatgtacatttggcttctccgaactatgcgttgtcatgcataggctataactagataagcaagattctaattgttgtgcatgtctacaacgtgtcatgtaaactgttatcctctctgctcagaagtcacaagtaataacaaacaagcctacacagacaaacaccctggtccctgacattaatttcaaacgcaaaacagcaaggcaggtccataaggggtggtttggtaatagataaagggtttcattatattttatgattttttttaattcagagatcatgggtgattctcaatctactagattataaactaattctattcgtgatacatgattgtgacttgatccaaagaattttaatagggtgtaaaccgaacatgaattctcttattaaataaatttttttcatacatataaacgcaactaagtcttacattattatgtccatcatttgaattattaaattttatgaatttattagaatgttctgacaatgcaaatttttatataatattatttattacatattattatatattgtaagtatatacatgaaattatttttaattagttacctatctaaaaatctaaagagggttattgcatgaaaattaaactcattttatttgcgtgcagaatgctacctaagatcttattcaacgaagtagttccttggctctagccaatttaactaaaataattcgcggctcaaacgcaacacgacacatttctggtcgaacactacaaaccttctccaggtctctgatattttggcacaaaacttcactgtctcaaattaaacctttcggctttcatgtgttcaatcgatttaccatggtaatttcttgttatctactgagtaattattttagtgggtcctcctggggttcagatgacacatgccagcgtaaaatttactatatgtactaatttattcttaagaaaatatatgagaaactgaaatttacgtatgctgatcatgaaaactgtatcctacaaagctgtacataacttcttgctttttttttttttttaatacttaaagcatgtacgtaacttatataaagtgcaatttccacgcacttactaattacgtgtgtatctttaacttaatttttagggtgaatcttggccctatgttatctctgagccaagagttacaaagattaactccttgtcatagatattaagagattaattaacttttcttaacaaatatttttttttatacacatgcatattttaagtaattatcacatatttaaatgataaagttatttgttagttatgtcacactatgatgatgtattttactcaccaaactaacaacaaaatggtaataacttatggtatcaaaattgaagtcagttaatcttttaaagcatattctaaattctaatgagttggcttaattattgttcttcatactttagtttttacttgagtttggaactgttttgttatattttaggtcaaaattcttgaaattatgtcttatcatatcttattccttaatcctagggataaagtatgataagatataatcaagatatgattgagatttgttatagatgttcaagatatgataatatataataagatataagatgataagataaaataaaatgtttgatcttttagttatttagtgtcaaaatataactatttataatttgcctacttgtaaagataattttaattgaacatgttatttttatcgattttttagactattttgatatatatatcacagtttttttaaaagaaatatggttgtcggttattttatatatgaaaggaagaaaaaatagattattcaaatttgtgcctgattaataaaataaattgtgaatgatttctaagagaattatttaataaaactgaaaaaaaattaagattaacatgatacacaaaaagggttatcttcatgcaattattattatttttttaaagaaaattgaacctaatcaactagccatcattcttaattaattacttagctaatgatatgtttgaatacacaattctacatttattagaccaaatccctgaacagcagactagctaatatatatgcctatgtggtttagctagcctgttcagagattggtctaacaaatgtagagatgtgtacttagcatatcattaactaagtaattatatatatatatatatatatatatatattatattataccgtacgatcggttaaattcaatgagcttgatgttatataagaacagctatcttccatggtgtgacatattcagctttcatagagtttttatttgatacgtttttctctcctcattctagagccttcatcttgttcaggtggcaaaaaatgtcttcatcttccctctccataactccattaatcttcgattcaaatgcttttgcattctcatatcgatccctttctttcctctgttggccctttatattcttacggtccctcaattagatcttccatattattaatttgttctttaattcctatatatatcaaggatcatgcataggtgtacagaaggagagaagctttaattggtgaggctgatttgggaagaagaaagacaaggatcagtatatatggaggtgaattattcatgcttaattgttaactcccgttgatgagatatacagcatcatgtactaataatctttgtgcacatcaccccccacaccccatctcatttctaaagaatatagtatatatacaagtacactagctcattcaataatatatttctaatcagcatcatagatatctatttcttacattaagagaagcctagctacatgtcccccctcctaatatatccttttgcaaatataagacctaagatctaaaatcgattgatattttgaaggatttaatatatagatgacagcatatataaaagtaaaacatgaattaaattttagagatcaagtaattttctgaaaaactcactgccacttgattgtgatctacatattcttgaagttatttagtattattttctcagttttagggctattatttcccaggattagggctagggccattttctcagttttagtattatttcaaacttgactaattatgtgttaaaaggaattagtttcacatcttaactaaaagttgtagagatatataaaagaagacgaagatttaagtaaaattaattttgtttagatataaactacataattaacatatgattggtagaaaaacatgtctctttcgtttgtacgtatacacatgaattcaatatcaatatatatatatatatatatatatatatatatgtacacatatatataagttaatatcttaaataaattttaatacttcaaaatattagtcttggattttcagttagaggatacttaagatttgtaataaaacttacttgatgtaatttaattaattataaatataatatacatatttagaccaagaatagagtagggaaaaggaaaggaatagaaatatgcttgttttgatacacgaaaggtccacatgccatataattattatatatgtatggtctgattcaaatgcatgcatgatggtgttattgttcataatggacagggtgatcttgatcacgagtggaaatgcatgtcttgaagggttctattggtggttaggaatggactgtgatgagtgatgtgagatatctcatgttgacagaagagagagagcacaacccgggaatggctaaaggagtctttgcctttgttgggagtgtgctctctcttcctctgtcatcatcacattcacatgcctttgctttctagccaaactagacgtgtacatgcagcgtactgccttataccatttaaggtatgtgaagcttttctttgcctcaggttggattggttataaataatgtcgttttcaaaaatattgaaatggtatgtcaaatacgatggacatgagaatggataaattgtaatgttccttgacatcactgtaatacatgcatgatgtttttcttcaaaaaataaaataaatcagaattcaaattaaagaaaagggaaataaaagtggataagaaactctattttatattcgttgaattttaccataattatagtaaaaataatatcaagaatattcttagagttcaatggtaatctactaatagggataaaaataaaataggttatactagattttatataaataattaagtctgacctttttaaaagtttaatctatcttattagtctatttaaaagtatactaacaagataaattttaaataagctaacaaacctatatttaaatatgtcgagttaaacatataattgctattaaaacttagtttttaaaacagacaaaaaaagaaaacgaatgtaacatacaatagaaaaagtactaacataaaaggctaacttaaaagacatatgataaagaaaaaaagctaatctaaaaacatgggaaactaatgtagaacgataaaagccatatgattcaacaaggccgtgaaactattagtaacttacagattatattgtcagtcatagcctaattattatttattttgatatattaaataatatgacctttggttttattgatttatttaattaataatgttattattagtattatatatatatatattatagataaatagacaaggcctaataattattttttacaagcctaactttagcctatttaagtaaataggtctttttaaaagtacaagtctaacatttttattaattattaagtaagtcaggtcaagtcatattctcactcacaactgtaaaataattttacattaattatataatcataaattatcatatatgataattatgttgacttttataataaatatattaaaattcatataaaaaataattttttattagatataaaattaatttacactattcatacatcacccttaatctcatatttgtattggttgatatagtaataatgtaaaaaaaaatttacattaatattatatatatatatatatatatatattaaactcaattttcataacatatagaactgtcctacataaaagtcataactgataattgattttaaactatactactatatacgtattccatgaattgtagttttctgctgttaaaatttgggagaaaatggtgaccaaagaacatttctcaatacaaaatgcagagttcaagatagaaataaataatgcctcagcggcttcccctttcctttcctagttatttccaagaacaatttttgtaatggggaaaaattaggaacacattcagtaataaaaaattgtttacttactcattttcctttgtcaatacactgataatttgttgcgaatcgtctgagagaaatgattgtgatgatttgtgaatatatacgcgcggtggcatgatgaaaatgtgagaatccaaatcatcaaccaacaaaggagccattttctttttgggatacaagagccaatttggattctacaattaattaaggcgaatatttgtcaaaatattattttattggaacctttttatatttagttggtctgcgggaatttaatggcatgctgatatttcatatttcagctagctcagctcagaaaatgacctcttactttcgatcttttcatttctttttgttttggtggtgttgcttcttgtcaaatttctagttttgtatataacacgcttttaatgagcacgcttatgcaccaccataatgggtaggaaaaccagtacatagttacatacatggatataaaactaaagcagacagtggcttttgtctcttgattaaatgattcaaggttttaaatcttaattaattttaaagtttgaaataaattgtttgtgttaaaaaaaaaaaatattcactattatatattttggatatgaaagattaagatatacacaggtgcaaatagaacgtgagttagaagattaagttgtacatgagctaataggatgtgacagcatttacatttggttgttccaaattatataaacgcattggcatgcatattggacaataaccgaaatgagtaagatatcgattgttacggcatgtctacaacgtgtcaagggaaatttgctttcctcacaagtcacaaagttagaacaaatgaagcctacagagcaaaaatcaaactgaaacgccaaaactgcatggcattgccaggtccacagcggtgacgatggttcttgttgggagagttttaacttattactaggagtgtggatccggtgttttacgtgacagaaaaggggaaaaagaagaaaagaaaagagaaaaagcaaaatgttaaaaaatgaaaaaaaaaagaaggtaaaactgtcaacttatgacatatgatgacaatagtataatttttatatagatatagattaaaattatatttgaatatttaacaaaatatttaagttagtttgtaattttttttattagttgaaaaatttgtttgattttttgataaacaaatttttataagtagtttctaatatttttttaaaattattttaagtaatatttttaaaagatctagcttataattttttatatttttatttttaatatatttatctaatttcttaattataatttttaaataaattataattttattattttttattatttaacacttttcaactaattcattagttaattttatcgaatacttaaaatttagtaacctaatttttcagtttgtgattacagttaattttcagctaattttgaattttgttaaacataacctaaagttgaaaactcattagaaaaatcaacatttgaattaattttgtaactatggaagtatgtttgcacaaaatagccaagcaaaatgcgagaaggacaacggatacaattgagcgtttctacagaggtacatcgaaacttgtaattgtgacagcgaagaacagtagcaattcaaattatattcatatgtataaactgacaaaaaaattattgtaacgtcagtctgccacctactaaatcaatttcttttagaggtgagaaagagaaatgtatataaaaaaaatagtgaagctttttaaagaaactaaaggagttaataaagagattcattccatggggagaaattcaaagtagcacccttaattgctttgtttttttttgctgggtacaatcttaattgcttaatacatagtttttattttactttctccttttaaaaaatacatagttttattttcttgttattactaattctaacatctttagccttcaaccctttttgatggtttgttcaattaccatgactttccgttccttgagactggtataaacttgtggtcaaaagccttttgcttctgcttcttggacacaacgttaacatgggtgtgatatcatgacattaggctttatattgaagtcccttataaaatgatccgttcttgcatctgatacttgttgaacttgaacaaggtctttaattgcttcaggcataggttggtcattcatcattttcttccaataatcccccaggtcttttcttgcatggcttaagttgatgttggcaacctattagtagagataacattgaaaagtcataaaccatgcatctcatgacaaactcaatgtttcaaatttatgagttgcttcagaaaagcttaccaggagaagagacaagattgcgaacaacgcagagattggcttcatttctttgctaagatcgatgtgtgctcctccttatagcatgattaagattaattatgctctagctaccttcacaacataacatttttcttttagtacttgtcatccgagactaaaacggactaaaaatgtatatgtaggaaataagttaaaaagtatacgtgcaatgattaaaatataaagattgtgcaaatatatggaataaatgagtaattaaataaaaatagagtagattacagttaaactccctacttcaggttttggtgagattgtacaaactcccctcttttggaacgtttacatcaatccttgattgggatgatgtacatgtaatgtttttgaaagtgtaacttttacaatggtatgcaaggctttaacatgctctttgcctctttcccctacttctccgtgagtatctattgcgatttacttttgtttcagtgaagaaaacaattccatattatttgtattgaaaattaagttgtctggcaaattataccattaagtttgacacagaatgagaccaaggcccgtattattaataggggctctgattaaaaattctgaaatgaaacattacagcatgattgctaattattgctgaagtcataagcctttgaacaaaacccgatcagcctaatcctacttggtagtagtagtaatatacaaacatctatgtcaattttctactttcctcattctgtacaaacaccatgagaatgagagcacctaaaacacggttttacttattagaactatgaccaaaacaaaacaacaaaataagcttcgtctattgcgctttgaacatacatagcttattagccacatgaaattcagtgtattagctctgtgaatgaactatcactatgtaggatatgactcgttagtttttgagactacagaatagcagagtatagcattagaaatgatcaccggaaacaattaaagaatgaaaagaataagttgagttgatcagtcaattttgatctcgcacatagagtcttgatcagcctctgaaacaatgtcctcaatagtgagaggcagaggtaggtcagaagagaaggtgagtgttggcttcacttttggcacaacaagtggtgcagcctcattgtttagaatttgcagcactctcctcatggaaggtctctcagcactatcaggattagcacaactcaaccccaaaagcaacaatttcctcatctcttcctcctcaaactccccattcaaccttttatcagctgcctcaatcacttttccttcagagtgaagcccccaaacccaatcaatcagattcaacatcttagacccttctctttcaattggcctcctcccacaagccacctcaagcacaaccaccccatagctgaaaacgtcagtcttatcagtggcttttccatactgaagatactcaggtgcaaggtaccccattgttccagcagttaaagtggacacagggctcttatcatgatccataagctttgccaatccaaaatcccctaatctagggttgaagtttccatccagcaatatgttcccagccttaatatccctatgaatcactctctgctcacactcttggtgaaggtaaaccagcacagaagccaaccctagtgcaatgttttgcctgtgagaccaactcaaaagcttccccctttcaggttccttgtaaagcatcttgtccaagcttccattgggcatgaagtcatacacaagcagcaactcccccttctcaacgcaccaaccttgaagttgaaccaaattcttgtgcctcaaaccagcaatggtgttgagttcagccagaaactcagtcttcccttcgtgagaatgtcttgaccttttcacagcagcgatggttccagaagatataaagaaagccttaaacactgttccgaaagatccatgcccaacaatcctactaggatgaaactctcttgtagcagacttcaactctttgtaatgaaactccctaggataagccacgaaaccactcttctgaaacttgtctttctgtctatcttttctcccaccattcttccatctccgaacaaaaacgaaccccaagaatattgtgaaagccacaaagaaagaaacagaacccgcaacaatgccaacaaccctcttgtcacgcttcttcgtggcaccagaacgtgaaattcccaccacggaaacattatgagggtggtgcaacgtggtggtgattgtttctgtgtgaaaggtccaatttttgatatggtgaagctcggtgcttccctgagtggaagcggagaagccaacatagacggggtctctgaggtaatgagaaagatcgaacttgacagagaggaggggtaggaggggttttgaagaacgtgaatagctcaagaaaacgttcagtaatgtgtattgggtgttgtagtctatccatgcagcgatggtgttgccgctcttgaggtcgatgccctcaaagatggggtctccggttacgagggacttcaaggagtccacgtcgaagcccacgtggttctcgttcgggtcgtcaaagcgcgcgtcgaggcgcgtgtcgaattcgacggcgacgaagctggcggaggttgggaggccgagagggccagagagggtggtgttgggggagaggaagaaggcgaggccgtcgccggaggaggtggggttgaggttgttgatggagaaggagaaggtggtggagaaggaggcgtggaagagggagataggttggctgtagacgacggcgccggtgctggaggtgggggcggcgttggtgagtcttacggcgccgttgtttctgagagaggaatcgccgaggagggtgatgttgttgagagtgaaagaaggaaagtcgaagctcacgttgtctgctactgccacctcccacgagaacaacaataacaacgtcaagatgaagaagaagaaagtgaaatccatggccatgaactacgtggctccaagaatcaacaagaaaatgaatggagaagagaagtggatgttgtgtgtactgcatgtggaggctaggtatctttattttgcatttttttagcactatgtctatgtgcattatcaacttagttttttatcctaaaaaaaattgactttataatattaaggtatacgctattatcatctcttcagtgaacgatatacattattcataaagacattttccataataacaatcatacatcaaccaaagtagtcattgtaatatgaatgaatgaggtagacttgaattaaaaaataatcgacacttaaatgagagaaactattgtcaaaaattttactttgtaattaaggtgtataatatatgaaattagtgataaatatactttaaaatgcaatgtcacatgaagaaaaagaatatattatataataatgatgaaaatgcagtattatataatgaatatatagtgaaaatagttttaaaattaaggtttaatgatatgatgaaaataagattaacaaacatagctattagataaatgtttatcatcttttatttcatttcttgtttaccattttgattcttaaatgatattttattaaaaatatatatgtattttggaagtatatctcccaaactatggattagagttccaaaaatatatttctgaaataaatatatgtaattctgaaaagtaaaagggatgtacatctttaagaaaaagggtataatgaataattgagaggaggggtacaggggtgtacttggataaaatgagtgtaaatagcaagagcctaaagttcctagtattgttgggccacctttttgaatggaccctttcaatgttgcgtgaagtatggtatgggcatggagtattggaatttgacgtcttcgtgttcaacgcactggttctcatcaagtgtatataactatatatttgtatgtgtagtattcttttcatttcattcatcgtcttatttggcactccccatcctcggcttctgcttctgcttcgtggagcaccctcaatccgtcacccaacacacccatgtaaggttctcttttctgtaatttaattcactacaatgtctttttagaatcacagcagaaattaaaaatttgtctgaaacctgtttatgctttttgttggcaaataataggtactaatttggaatttattagaaaggaagacatggttgggattcatgtttgtaatttgagcttgaaactctatctcttcgtgcttaacttatttggagcttgtaactggaattccaagttcaattaatccatcaaggaaaaaaaacaagttattttgcatttggatttcagcattgcttgtttttaatggtttcaggtcatggatgttccattgccactggataaattggctttagatttgattaataatgaaccctcccctgcaaacacgagcaagtatgttcctgtctgtattatttatttatttatttattttgtgagggacttttcttttgaccttattattaattaattatgacattctttttctgtctctcattaaaacagcagcaagatatatgtaattctggtagcaactggaagctttaatccacctactttcatgcatttacgcatgtttggtcagttgcgtttccttaagtttacagtgcagagacttgttattctactgccctgagacatctatacttttttggtgcttataaaactcaaatctgaataattttaactccttcccctcctctaacaaaaataaatgacatcttgaatataagttcattcttgaaggtattgattattgaacaatttgacacttttctatttttccattcagtgtagaagaattaaggggaaaaaaattaagatctcatatacatcatgtgaaaaaaaataaaagtcaatggttgctcaatagtgtagtagccaaaactgcatgcatgataatcactttaccatttacagtggttttttgcattttgtgatcaaaccatatgttaacaattgttaaaatatactcactataaattatataataatataggcttctttgtctacttgaattaatattataattataaaatccatatacatataattgaatttgttattgaaaattctatgctgtacttactacatagatgttcaaaagagttgggtttgcctgggaacaattcataccagtgtatcttcttgtattgttagcttccttgagtcatgatctctgagtttctactttcttaatgaaggtgaatgggagtatatgttgaatattccctctaattcacttacttcttgatggaatttcattaacttaatttcttgaattatgtgcaatttaatttttaatttcatttattctctgctagtctgatttttttaaaataaaatttgtgggtgttacccttagagcttgcaagagatgcgttgaattcagatggctactgcgtaattggaggttacttgtctcctgtgaatgatgcatacaagaaaaaggtatgaagttgtcaagcaaagagagaaaaagattcttcatttattatatccatacatgcgagtctgtaaaacttgctagcaaaataaatgaataaataaggtaaatcatatgcttggcatgtggaaaacactgaaacacttgactgagtttttattttacttttttcagcaaatagatcaaatatgattctatgaatgaaattatgatttttattaatcaagtgatgctattagtttcactgccacatgttggtctaattgtattttgcttgcttgcatgtttatatagggcctaatatctgctgaacatcgaatacaattatgtcatttagcctgcaaaagttcagattttataatggttgattcatgggaggtaattactctttctatcagctaaattgcatgtcttcctattttctgtgcatgttaataagtttcattatccatagatttgaatttgagagacaatgctttgatgtcatgcgtgttgtgagaaatatttggctctctagctaacctgatttattaatattttgcatttttatccggctataaactgctgcaggcaagtcagagcacatatcaacgcactttaactgttctctccagagtccagaattcagtttgtgagacagggttggtatctagaggtatgctcaacaaacaagccttcaatgaaatcacattactctaattgccatttcaaattgctcccctgccccatcttaaaattcaaaataaaggaagaagtgacactgacaccagctgtcttaatctcttttaagaatgaaatactagtcacattaatggtaatccgtactgctgctgaactttttaaaaaaatgtggtgctaagtgttaggaatactttgtgatttaaatgattaatatatggattttaatgtttggacatgttttcctgtctctggcattaggtggtcatttgactctagtattttgtgggaatttcttagtgctatatggatgcatgattggatgggcaatttggttccatatggtgctaaagccttcaaaagttatctattatctatcttttatatatatatatatatatatatatatatatatatgttcattgacttaaatgtgttttagtgtaaaaggagcattaatagttccctcccttcattaattaaaaatgccgtgctagattttcatttctttctatgcatgtttttgacaatgttgtaacaatgcaataattttcttttgtattgatttgtgtagaatccctcaaggtcattcttctctgtggttctgatctccttcattcttttagcattcctggattctggattcctgaccaggtactataacggaaaaatcgaatattatttatcatagattagtttcacatggagttatttaatgattcttggaacaaaataccttgtcccacctaataaatttgataaaccaaccttaaatggttgtggaattcaaagtcagaggaattatgttgattttgtgtttttattgttagaattaacaagcttattgagtcaattattcttatttcttaccacatagatacaaggcatgggtggagtatagattaggagtgtcaaactaatgaattgcataatttttttgaattgaatccatttatggtccattaattatgtattacaaaaatttaattcatccataacttatttcattaaaaaaaggtccatccattatattttatttttttcaaaacaatatttttctaaaacaaagtttaatatttgtacacattcttacacccaaataccatagaatccaatatttgtctcataaagacctatgtccaagtaatgaacttggaactacttgattcactggattgcaaaatatgttggatggttcattatctatccaataacaaattggtaatccaattcaactaatgtattaagttttatttttataattgaatagattgattggttgatttatacttgatggattggacggttagtggataaaacgattgaattgccacatatgttaatgaatactaatttgccataggttgtggaaacaatgaactataattttgtttttgtacttaaggttaaaactatatgcaaagattatggagtagcctgcattcgcagggaaggacaagatgttgagaagactatatctaaagatgaaattctgaatgagaataaggtatctcacatttcaagcttgtcctatttccccatatgcgtttaaaatgaagtgttgcttatggacattttcaaatatctgtttactgtgtatttgtattttaccgaattaaggtcaaattatagaccaacttatgaaatccttctgtgatgtcccatatacttaggtgtgttgatgttcgatcaacacgggaattttaaatttaatgattaaaatttattatctttttgtttgtacatgtatgtgctagcgcacatcgttttttgttgctgtgattggttagaattgattaattcctctcaaccttgattactgattagctgttaaccttggacactttttcttgaggtgtcggagtgtgagacatgtgctgcagtaacacccaccttcttgacattttgttagacatgtgtcggatactacttaataagtgtatactggaccttgctgtatgacttggatacttgaaccatgataccttcaaagtatggatggatacttcaaggacactagtactatataaactataatatatatatatatatatatatatattcaaatattcagttatgaaacaaaattcctgggaccagagtttgtattagcgttttgttatgtaatgaacaataagaattagaatgcattgctttgctactcagcttttatacatatttaaattttccactatttttttaggataatatcaaagttgtgaatgaacttgttccaaatcaaatcagctcaaccagagtaaggtaatgctatgacattgtttactttcaagagttacaggacgataatttttaaaaaagagagacgttcaattttcttgtctttttcactaatctcagggattgcattgcaagaggactatctataaaataccttactgcggatgaagtgattgattatatcagggagcaacaattatacttgaacttaaatgataaatgattactactgtttttcattacattctgtagacatgggtctttgcaagagccactgcgcatcgctatctgagccaattttctataaacagatgatttttcatttttgtgttgtaaatttgctgataaataaatatcacataatttatgtaatcgaattgcaaatactactgttgaagttgctcattttaacttttttggataacaagtgagtgaaaaagtcttgcaatatagataggaattgataaattgagcaatacttaaagtgcgaagaacacttatacctaatgcctttaagactgagttagatgtagtatgttaagtttatttgttaacggttgatggggatctctgcaatatgtttgttctaaaaaaataaaaattgagccagggatattcttgattgaagccctgatttattgaaatttattcaagtagttggttgttctcaatagaaaatttgttagtataggcttaaactagtttttatcccgtggtgatgttataaggtagtaaaatttagtgtcattgttggttttaaggtagtaaaatttattaaataatgaagtgtcaacacagatttgatgttaatttaaaaaaaattaaactctagctaaataatattatataatcaattactgagcacactatattttacattcagtcaacttgatataggggcacgaaaaagagaccccatacttaatatattaattgttccatacattttaagacaactttaaatatgacaaaacaacacacgttttttttaacacaataacagaaaagctaaaaacaaaatgtataaaagagcatgttgtagcacgcctcctatatattgaaccacactaaatgcatttcttggatcgttgttgtacttctgccacgattaaagtaagcaacatgatgatcatagcaaacattggcactgctactagaaccaccaccaccacttgacacatcaccataaaacccacccatcattgttcccattgttgggtttcgaactattggagggatcactgggaaaacaccaacaaaaaaattttcttgcggcacagcataatttatatttgcaatagttggcagtgtagaaagggacgccgcacgatgtgggactccttatcaatatcatcaccttcatcactcttatagggagtattaatttaaaaatttaagagaatctcagtgtaatatgtttttaaacataaaacaaagtgttagtgtattaatttcaaatttaaaaagaatttgtacaagcaaataaaaactatatttaattatgtgtaatgataaaaatccagaaagtaatttgatcgtacatgactaatacaatttgtgataatcatattataataagaaagtcttagtcatgtatgtggagtgaaaacaggccagctcatgcccaatgagttagcactccggattgtctaagaaatattattcttttttctatttttcttttttaatttgaggacgttattcatctctcgctagttgccatatatatttataattctgaatttcagatgatagatttctttataaacaatcttgaaaactctttttatccaaccttgaaacgatgaaatctctcttgtgcacagtgcactgaagtctgcaaagtatttttttttttttttaagtctttaaaaagtatttcgataggcactttttcctctaaaagtatgacttgttattagttacaccaaccccatatgctcattgaaaggcatttataattcaaatatgcataattaaaaatctatccttaatattaacttgggggtatagcgttgccaaagatatacagtgatatatatagttttaaagcttacaaattacatatacgaatatgatgatcgatcgatctacatgaaattaacaacccttcatacttcaaactctgaacgtgaaacaccccttaagtcaagtcgaaacttgcgagttgtgaggcacgtattattgcactgtagacttatggtttaaatttaatttgacaatcaactttctgcctttcgaaaaagggaaaatcaaaatcttgttcatactgttgactacatccccacccagcattcaacaatatatgcgcaatcatatcctacctaagaatccccgtgtattccaattgtactatcaattataaagtattaaatagggagacatattaattttacaaactatactcactataatagtataattgaggtgatataaatttgatcgtacagtacggatgaattaattaatgatcacttaaagtaaactttttctagaaacacatgacaatttatggcatgtccgttgagaactcacacgagagctgcgcattccatggcctatatgcttgtggtcagatagttataatgaataatgacatattaacactttatgatttcaaagatttaattaatattcatttttctgttttatttctctttagcatcatatcacttataatacatatttatataaatttttttttatccatacgaattaaaaacataaaatttataataatttatgcattttagtcaaccaagtgagttaactcttttaacctatgtttatataatttcattttattttttagctatcagttagaatttgatgtttgcccaatatcatttttttgcattataaattgcaaccttgtaccaccacttcccaacttccattgattagttctaccccctatcctatgctttgaaactttagccttttgaatccctagctataattctatagttaaatcttcttgtgaagcttaacattcagttgagccaatgtcaatcttaccaagttcaggggaccgattgtgtgagggtgattttgagattctccctgccacaaatgatgcccatggaggagtcattgtagatttggagaagccaatggactctgaaattttcgttactctgcttagaacatcactttcaaaatggaagaaacaggtaacgatatcaatgcatacttcattaagattaaggtattcaacttcattaagattatggttcataaaataagatattaattcacgtgaaaattaagtgtaattactcgtcttgtaagtgtacaatttttcgttgtttataaaattcttaagcttcactgatccttaatttctttcaaccctttgtttggataagtcatctacagatcctgcgataggcttgagtgcatgttttcgcttcccgtgaaagccttagcctccagcaccgattgcttcagaatcacgtcactcagcaaattttatactaaccctgattttatataaaaataataattacttaattcatcatgacaaataaaaatagttagattaattgttttgtcataaattttaattttatttcaaaattatttataacattaaataatttaaaatatgattattttaaaataaaaaaatttcaatcaataaatgtgtcttattttgttgatataactcaattaaatacacacttttatggaaaaaagaaagtaatcattaaaaataaaaaataaatttaacaataaattaaagtagtctttatatctgttataattaagataaaaaaatattatcttttgttttatatatatatatatatatatatatagagagagagagagagagagagagagagagagagagaacatcataggtagtaatcgaggctagagataatgggagagacgagtgaatgaggaaaccacgtgtgaaaccatgaattattttatcattttttagatgctccatatatttgcaatcagaaacaagatgttatataatcaatattaggcttttcaatctcatcattttatttttcttcgattttgaaaaacagatcatgtaatatctgcatactataatcagcttactaagaaagactagttcagccggaaaatgtgaacaacttttaattcaagatagtatcaacatttatgaatttgaaaaaagtatactatccaaatgatttgtaaagaaaccataacattaatcctactatcttatcaattataatatacgttgcaggcaaaatgcggtgtttggatcaagttacctacagcattagttaatcttgttgaaactgcagttaaggtaatgtttcctgtttgtgtcagattttaattactttaaccttgtacaaggataaggtatatctattcagctacataagattgttttaattaaattatctaatttttaaatccagatggaaatgtttgtcagattctaatttcttttcttaaaaaaaaagtatatttttagaatgtgaatttggatctaactcaacctcaaaagctagttcaataagattaaattcttagaatatgagtttgagtctaactcaatcccaaaaactagcttaaaaaattaggattgttctcccttatatactctattttaattttatctttagtcgatatgagacttgattttttttcaatatatatatatatatatatatatatatatgcatatgagtttaatttaaacttgatcatgttagttttcactattaaataggaaattattggaaatttaatttaataatattattcagttttttcaattatttaatttaatttttgtaatttatattaaactgattcagttcatcatgaatactatcagtatcagaagacaattttatcgtgaaatcacaatggaaatgatcgaatggatgggatcgagctagagaaactattttcaatataaatgttatctcatttttgtcagatatataaatttttcaatgaatatatatgttggtggcatgatgcaggagggtttccggtaccaccatgctgaaccgaactatctaatgctagtttattggattattcctgaaacaagctgcacaatccctcccaatgcatcccaccgtgcgtgtaaggatcggtggtcttgtcttaaatgataacaaagaggttcgttcaaaatataacaacaatatataatatatggttgcctccttataattgattccttgtttgctttcaactagtaggtttcattttacaactttaattacttttcctctcttaattattttcttttcttttctttctttcttatggtgggcttatatataggtgcttgtagtccaggaaaaaaaagaggtacattccatgaaaaactggcctgtggaagatacctactggaatagttgaagcggtatgaacattttcaaccaaaaattcctccccacgtgttgaaaaataaatatttcaatttgtgtagaaacatgaaattaacatgataacttcagggtgaggagcttttagccgcagctgttagagaagtaaaagaagagacgggagtaagtgtcaatgtaaaatgttgctatgttgcattttatatttgttgttaattaaatgcgcgccctttcttatgttgtattaatataactcaactttgctatttactttccttgttcagattgatacagaatttgtggagttactggcattcaggtctcaattttcttcctcaaacttactttagaaactgaactaaatgtctgtctcctacccttttttcttcatcatgattttagcattagagaatgtaaatatataaattgtctttgccttcactgatgatagacatttacttctcataaaatctgcctttcttctttccctcttattttaattttgttttaagctgctcctcatgtttatgatttgtaggcacgcacataattcactatttgggaaatcagaactgtttttcctttgcatgttgcgtactctttctactgacatcaaaaagcaagatttggaaattgatgctgccaaggtatacagtctttcttttatttggtttggatgtaaagatgtcacaaatgatcaatgagctaactgattaactttacacactatattgccatatctgatcgagtcatgttttgcatgtctacatttaacaaagtttatcattaatttttatatatcaagtgacaaagtagtttttgttctcatcacccaacaaatgatagatattttgcaaggataagaccggatcacataagaagtgacatatatatgacaagacacataaatgaagcatccttctttaggactagctagtattaattgtctaacagatgagccaagcgacgcatatatatatatatatatatatatatatatatatatatatatatatttacacctaacattttaatgcgcatgctctctacaacaaattaaagttcaatggcaaacaaaaaatgactttcattctggtgcgtgaacgtgaagtttgtgtgacataatatgatagaaagttggattactctgctgaatatatatgattacacgccaaactgtgtttggttggattaagcattactagacattttaattgcgaccaaaatttttataaggattatatgaccactatccacatctgattattttgtccccacatttttagcccataaagcaacatataattatctcgtgcgtaggttcggatcgatcacgtcccttgcatagttggaaaatgaccatgcaactcataagaatgatgtggattcttgaattattaatacatgcacatacgatagagggttctatttgttggcaatttttctacatgtttaaggttacaattttttgagcctctccaaccatattaaattagatacgaatattctttcaaacatcctatcgacacattttatttttctttttttatcatatcataaactctataatatttatatttttcatttttctctcacctactaagtgtttaataacatttgaagtgttcatttatcttttttctaactatagttaatacggtaatacccttttctctaaagaatttaaatcatatatgctgactaattaactttacactgccatatctaagtgatgttttccgtactaatgtagtgctattgttggtaatcatcttgtaatttctatttctacggttttttttttttttttttaagaaaaaactatacaataatgagagataaggtggttaaagtgatagagagaaaagaaataaaagtataataaatgttatgtaaacttgttatataaataacttaacttttttatctgtatattattcaattcttttgacttcaattttcatgtatttcttccttttgtcacaaagtggatgccgtttgaggaatatgctgcccatcctattacagagatgcacgagcccttcaagtatgaaaatgaattatgcttagcaaagttagaaattaaggtgctatgctggattttctccacgacctatctcatcatatttataggagcaattgagttatctatatttaaatagccatgacttggacaagtcttccaattcagtcaacggtttgggtcttagacaaaagttgaatgatatctgtttctcacatttcagatgttaattagctgctcgttcttgtttcctggatttttcatgtttaggcacagacacggtgattatgccaattgatcacactagctaggcttcattttatttgatcgggtgcaactttagcattgcgtctaataaaccataatttctctgtttttgccctgtatttcttttaacaccacagattttacatttcgattaattagatgttgtgtaagttgtcgtgtcgaaatttgaacaattcctacacaaaaaataatcttatgactggtttgggggggggggggaatattttgtttatttggataaaaaaaaaatcaatgttttctcccgaaaattttgtcttcattttaattttttttcatctttcaatttccttttcttacaaacgaaccatagtgattttttgaagatggcagaaaaaatatagtaattttttgccccccaaatcttcattgttcaataaagaaaaatctctagttaaaagaagcatttacttgaaagaacttgttcagcttttagtgtcatcattgtactgaactccattatcagcgatagtgcaacatttatcaatgatgaaaaagataagttctaagaagaaaaaaaaaaacacctttaattaaagaaagagaaagtagaagtgaaaaggaaaggttgaaaattttaacaatccgttagcacagagactcatgcaaagaggaagacatttgtgtgttacttcaataatatcatgacagatgtgctgccatgcggcaccatctccctagtgtagaagaaaaggaggcgaatgatccaagactgcattaaaaacaggtgctggttgcaaatgaaaacatccaaatctagaacactcttttccttctaaagtctttttttcgagtatgattcattctgtgattttagaagatatgtctaggggagtcttcccaacagggactggagacaacgtctccaaaactttttttaaggtctaatgttgtttgacttgtgttttattatttatagtttggaattaggtccataaataactattatatttagtatttgtaagtctatatattttttataatttgagtgtaattatacaagtgtgtaacaaaatatagtgaataattgaatgtaatccacattgggtgaactggctaaattctgtgtgttattttctttttctcttttatctttttattttttctcgattattatgtgattgtttagtatccaacatttatgaggtcatcattgcaattcccattatctcccagctccacactcctttccttcttataaatgaattttctagtctgaagtaagtaaaacattaaagttgagagaaaaagaaatgtttggagcaaagtttgtggcagttgtagttgtaaccctctggttatcacagtccaattttaattttgaagcttatggggatgcagtaggtgatgtgatcccaaccccaacttcttgtgagaattgtcaggttactccaccaccttctggttatccttcttatgaagctccaccaccaccatcacagccagctcctccatcttctggctactctatatatggtgctccaccaccaccatcaccacacaagtcaggccaatctaagtgtcctcctgctgcaggtgttcagtgttgtacccctcctgcaccttacacttatggttatggttatggacctccaaatccttacacctatgtgccttatggggaaggtcaaggccctgcttctatggttctgccaattatagcccccctcatcatgcttttttcctcctttatttttctagtctgaatttgccttctttttgttgtttatcgtcgtataatatcctgttgtcaatactcaatagttataaatgcttttgtaatatattcatcttgtgtagctccatgtggtatataccatatcctctccaagttcaatatccattgttatatatagttaaattccctttatgaataccctctttttggtatgaatatgatagcaagaaatcttttttcttagcaagtttgtggctaatttagtatttgttttgggggaagggaaggcaattttatgaagttttgttatttattttgatttttaagaaagggagatggagagaacaaattctctcccccatctacttttagcttttctccaaaatttaactccaattcattagttcaaaattaaagttattttaaggaaaagctgattggaaacacagagcatataataaaattctcttattctacgcaacatttttgtttgtactattctcacaatgattgttgtcattgtattacctttgtcctcgttactagtgacatttacaatctgtcactactagttactactactatttgttatatcatcaccattactttatcgctaccatttgcataaatggtagcatacaattatcaatattgttagcattattactacaactaccatcagataaaataacctaaataataattttttaataattaattatcaatttggattgtttgaaaaataattatacatctgggatagttggtcacagatggagcgatgcgtatataaactcggacgatcataacttttgactggtttgtccgattgaagcgtaatttgtgtcaaaacgctcgaaattgagagtagaagccctaggcaaatcccacaagaattatacacatgaaatttgcttctaaagaatgggaacatgctattaataattttaataaacattttttgatagaaaataacattaaaaaataacgtttaatatatctttcaaatggtttaacttttgatagaaatgtccggtcgaggtgtacgatatgttaaaacgctcgaaattaagagaggtaattaaaaaaataaaaaatagcatgcaattaactgaccaaataattaaaagaatagaaaacaagaaaatttttagatgttcgaaaattaaatcataattttgaggcacttagaagcattttttgggaatttttttgaccaaaaccccttcgaaaatttgtctagggcttctactctcaatttcgagcgttttgacacaaactatgtctcaattggacattccagtcaaaagttatgaccgtccgaagtttatatacgcatcgctccatctgtgcatgacacgtgtcgccctaaagtggaacacgcccaaaattggacgtgaccacccctagtcacgcctagagctgggcgtgactggtcatgcccaattctgggcgtaaccaattaccccagatgtataattactttccaaacagtcccaaattgataattaattattaaaaaaatattatttatgttcttttcccaccatcatcattattacagttataattgcaatcaccattgtccccatcattattaacagatagtaacatatttgtcactattattaacactattactacaactatcattatttttactgcaataattgcaatcaccgttgtctccatcattattaacagagagtaacaacatatcaaattcggaaacgcggttaatccattgctctagcaaggtaaaacttttgggtggagaaaatctgcctaatgatcaaaacagctaactaacggttactgatccagattctagaaatggtttcagcctaatgctgcattccagtaattcaagcaggcatgtgatcatgtctaccaataggtaaacggcaaaaatgtgaagaggcattttaagatgaaatggttttgctttacagtcctcgtatcacaaaatttaggtaatttctttggcaacttcagagcccctgatacaaatctggcccagggcaagttgtcattctaagtatatgagaagaaataaataaaagcattacacatgagagagcctgtttttgaatgttatatgcagtgtatgattcttgaatccatgataccgcaacaaaatagcaattttttttagattgttcccgagtgacttatacagagtagttgataagggtccaacacctaagcattttctaagaacagcagacatgagtattgtaaagctaatcacagatactatagatgaggtcaagtaatagaacctctggaaacagctttgatgctgctgtttttttatcaacatcaacttggataggtagccggatacctatagatcccacttgagggacattttgataaataaggaaaggagtataacaacgaacaaatgaaatcccgattgctttttaaagtggatgctgagaccaaaggcaaaactattctaaaactaatcaatgcaacatttgagaacagaattggattggttggacacaaggcgaagctaacagatagcatattgacatcctgttatcctttgattttacactgaagttaccatggatatgtagtcatccttactataggttgtcaatcctcaggccctcctaaccttgggaagagacatggaactttacatccacatatcagagtttatgctccatgtaacacctcaagatgctaaatgaagattgattaaacatctccagaattatcctagtccaacaacctttaagcattgacgccatcttgtatctctcagaaaagcttgttgtatctattaaccaacttctgtcatacatatttcaagagtacttagtacttgcacattcaactgaggctcacactctatcacgactgctctacatgtgtttagaacttgtttggatatgcttctctaaaagcatttctaggagaaaaaaataagaaacaacaaatgaaaagagtttctccataaactaaaatgaactcttcgtagctaatttgtagatgtcctctcatcctttagaaaagctatttgagagaacttctacaaattagctaattgagagcacattttagctaatggagaagttcatctcattttcttatttttattttcttgtcttagaagtgcttttaaagaagctcacccaaacaagcctttaggatataaaggaaactagaaagacacgggggagagtaaaatctaaaattgtcacatagattatccttgatcaatcaaacatgctactaatcgagcagatgtgagaaagtaactaaacactttaagatctaatatagggatcttcctgcctcaatatttacttattttccctcgttcattaacaggccaaaataacaatttggttccaaagcttccagcaaaagaaaagaggaaaagattataacttcagcaaattacccctatatgtgtttcctacttccgctatgcataaccattatagaaaaacaccactctgaagtctgaactcttagaagaatagctcaaactaaaacctaacgacataagaactaagaagagaagataactgattgtaggattgttaaaacatacaagaaattaacatgtatgtgtggcacactacaactcaaaagccataaccattcagtaaatccagagagatataatattgaattcaattaacaatggagaaggggaagtttctcatcatcttacaataattcaatcctgatttagaaagacatactagaatccagcaatgtaagaaacaactaaaatccgttttgcagaaactttccaagatagttaactattaaggaagtgaaaatgcaaacttttccactacttaggctgaagttgctttgctatacaattaaattatctcaataacggattggtgattcaaagaacttgcctatcagctgcctcagcaacaatgggtaatctggggatttgacccagcaagcaagaagaagaaccataaatcaagcacaccaagaggaacaaaaacacagtgctatccaaagtcattatcaaatccaatcccaacccatccttgggattaaaccctctttcaaggaggtcagggaaaatcaagagcacatcaaggacaacggcttgcatagtgttgaacctcacatacttactgaaattggggtttctcaccacaacaaaataaagggtcaaaaacacaaggaatccattaaaagggaagctcttgaaaactcttattgcaggaaccaatggttgaacaatggcttgaacagggtagaactgtgtgattacatactttccgtactgtatgccatcaaagaaagggtaaaagtagcaaagtgctgaaattaaacggtcaggaacatcagcagagtcactgccattggatttggccactatgagggttctcagttggtggggttttctcaatttctttggaagaatgtttagagtgagaagagaggggggatgcagaaaagtggattgaagtggcttctgtgagaaggtaaatgctgcggggcagaggaaggaagaggaagccatgtttcaaacgaagattcgattttggatgctgtatgccaaatggggagagaatatgacgagggagaaagggcacgaggatagataacattacagtattacactctttcttctttcaacaaaaactaacaaaaaaaaatatcttattttcttaggtaaggaaagtttcatcaaaaaattatttttgttaaagattttattcaattattatctaacattcaatcttgattttaacacattaattacttatactttaattggttttggacataaaataattgaataacattaaatataaataatagaaaatggacaataaacctaaactttaaaataaacatgtattatttgttaaatagttttatatttttatatcttgtaagaatatatatttttcaaatatcattgattatttaaaaataataaataaattctctgaataaaaatatttttttatatgcaattattttaactactctgaaaatttcaactttttttttatattatataatgaacatacaactttttttaaaatgttgttgtgaataaattgaaataatctaagaataatagtttataaaatgacaaatgagaaaaaaaaaaagatatagatttaataatcaattctctaaacaaaatcaattattagagcagtaaaaaaatcagcaactagagttttacatgattccattgcgagatggtatagttgtgggctggcttggattgtatcaacaaacaagcctatatacaacagcttacattggatagccctgaccaaaacaaattaaaggcccaaagaaaaacaaagctccagatgaagtaaaagcacgagtccttcccccatcttttgtcagattttaatatgcatgtacagaaattgtaaattttttaacattattaattaatgaaaaatcattattcatataacttttaaaataattattataaaaatcaataaattttatggttctgtgcgttaaaatacaatgtcagtgcatactgcatatattatttattcattttgctataagatagaataaagaaatggtagtttatacagataacttcaaagaaactatcacggattatggattgaattttctctaacgttgaaatgatttaacatatatagataaatctctgtatcaaattactggttgtgagtggtatatatgttttttttgatgtatccactatccaggacatttgatggtttcaggtagagagcaccatgcatcgcttatattcttcgatgtgaatgtgtattggcagcacactgtcatcgcttatatcaatttcaatagttgctaatttcctataaaaaaaaaaaaaattacctttatcaatgagtaatttgaggaattgaagtcagcttattcagtggcaggattcgaattaataatacttgtagaaatgtttaataataacaaattaaggtgacgagtttgatcaattgcttcatttctgatgcatgcaatgaacaaattatatactttcttcgtgtatattagtcaactttctgatttatatccaagtgagtattcatacctttaacacaaaatcttaaaacttaagttttgtggatcttttctcacttgtatgttaaagaacttttccattattatctaatatgagattttgacgtcacacttaaattctaacacaactaataaaaaatgtttcatcattcatatattcagctagaaaacacttccaatcacatgtatattcagctagaaaaaggaatatttgacaatgtgcatgggatggacgtaaataataataacaataaataatatacatgtgatggtacaaaaagaaagaaaagaaacactgtactttttaaactttgcaaagtgcccaatgaccaatgaaagtaataaaatccatacttatttcttggtgtaataataataattaaggttgtaaaaaaattataaataatataattttatgcattttaataaataaaaaattcttttaattccttaaaaaatgtcctaacgctatcgaaactcattagcatttttccaataataatgatagaataatttctttccctttctttcacttcacttcagcccccgaaattagtctctgagtcccagtggcaagcaagcactaaagagtaggagtgagtcatgcgttattatgattttaaaaaataataaaaggagcggcgaatagaggagcacgtcgatggtatgtatctgactatctgggtctacaaggcccaggcccaggcccaggcccaggcccaggcttacccataacaggaaaggcagcaggaggcacttgacgatggtggtaagcaggggagccgtatacgtgtccctgataatgatgataggcggcggaggcggagtccttagagtcgcgggcggcgacgctcttctcgccttccatctcgcggaagcgctggaggtatatcttgagggggtcgccgtagtcttcgaagccgagggtggtcatggcccagagaaggtcgtcgccgttgatggtcttgcgcttctccctctggcacttgtcggaggcctcgccggttatgaagctgatgaactccgacacgcattcctgcaccgtctccttcgcgtccttcgagatctttgcgttcgccggcaatgccttcttcatgatcctactcacgttcgcgatcggcaggaacctgtccagttcccgaggcgacaactccccgctgaagctccccccctcgtttcccgcgttctgcgccccgcccgactcgttgtccgactcagccatcttcttaacttaaccaatcaattcaacactctgctctgcttttctgagttcggttgacttcagagttcgtgaaaatttgagttaagaatggactgagcagggtccgttggatcggctgcgttaataagcctttatctgcttcacacgtggaaccttcttggccgttgtttgtcgataagcacggacaagtttcccaccatgggattggatgtcggattaatcatctggaccgttcctttcgtatctgctacatgctctcctctcttctctcgtttattctctttcttccgtctaatattttaattatttagcaactttgttgttttatgcccacacatcttaaatataaggttcaagattcactggtttttggataaatttgagttacttgttattaacagtttaaaattaatttcagtatgatataaataaatgaacaatatgctgtgaataaggtaaatgtttcgtgtttgtaaaatacacacggacgcacccccaacttatactttttatttgtttgttggttttagtagtactcgaaatcttagattaaaataacagcgctatctcacttcaacggcgggttgcggcatccaatcgctacttttttatcataatgcgacggtttccagtagcggccagtgatggccgatggcagcgttgcgggtgacaaatcttgcagcgctatcgcgccgctacttccatggaagctccaaatatacaaaagtagggattttattattctttagtgccaaaaaatcaatgatgtcttcttgatggatgaatatatagagtgtttctatagaagaatgctccaacactttagttactagcaattccagcaagtaatggtaaaggaagggagattatatgtgcatgaaaattttattttgtcatttataatagtgatctattttgctggtgttattgtttcagtatctccttaatcactttattaccactgtaacaagggtacaatagaatcagaggtacggtggtccttataacagtagaataattttgttatgacctttctttgattcacttgggctattcaaggcaacttagggtctaattaaacacgaggtttgagattctgatctacaattacctcaacttgagcctgatatatttatatgttaggtttgggtttttattattttggagactttcaatagctgtgtttgcatgtcaaacaagttgcgattacttcattcatgatcttacttctatgttggccccgattttgtttaaagttattattttagttcttaaaaatcttaaacatctattttttaattcttgtttttatgtagtgtagacaattaaatggtttttttaatactaaataatattttataattttaattcttatttttatatttttaagaattaaaatggtgatcttttaatgaagttaaataattttaaatatgaaaaacttaattaaacaatacttgttatgtcaaaatctaattttgaatataatgtattactcttgttatgaatcttaatgcttgagttttatttatgaaaaaaaaaggtgtgattagatcatttagatgtgtcggtgttggccataccacggtgagtcttttgagttttaaggcctccttgtccggtgtccacatcacaaccaaacgctatcctttacattaactaatgttatgtaaaggatgtaaaaacaagtgagtttattaatattttgttctaattttagtttttatttttattttaatattgcataacttttatatgtattatttataattttaaaatttacttatttatgtgtttaattcttatgatgtatatttcttagctagtcgtaattacaatattctctaaccatttatagaattagacttcattttatttttgggtaaatagtgaaattcatcctccaaagtatgatgtagtaaaaattgatttgatgaaagatgaaaaatataaatttagtccatccatattttcccaagtggaaaaaaaaaggtgtattttaaagttatactagcttataacactcctagaatctagattttctaccacaaaattcgcgttatggatgtattggccgttctcgtaactgatgttcaatggaacgtttgcgaagtagtgacagttataataatatttacactccatgtcaataatctcttttgttgaatttaattaagctactaacagaaaaatatttacaattagtgatttataactacaatctaagttgttaatttattttatattttttttataatttacattatcaatcaaattgtgatttcaaaacacaatacaagacaagcatctgccaagtttatttgaatttgagactttagtcacttgatcactactatgaaatcacctccaatcattgcaaagcatctggagaggagtatattaaacaacaccaaaaatctggaaaggagtattgttagtagtaaattgttttaaacatactttttatcgtttattaaaatttattaaaaacaatcaaattatttcaaacatgtctaagcacttggacaaaagctaacaaacaaaatttatcgtttattaacattaatagtgttttctttctatctctcttttgtattgcattaattttcacataaaatgaattcaatctctctacacctcttttttagttttaacataattcattacactctaacaaatatttaggatacattttttaactacaaatattttactatttttcatgcaatgaacttaacattaggggtgtacacacatcaatttgaattgggtttgacgaaattgattatctaatccaatcaaattaattttggtcaattttccaagaaaaaaatttaaaacacaaatcaacccatttgtaaacggtttggattgggttgagtcaacaaggtcaaaacatataaatttatctattattttttaaattttaatatttttataagctaaaatttttattaaatggaataccgaatacattacttataattattacgtgtagttaaatactagaagaaaagacaaggaatggaagaaaagacaaggagaggaattacattattgtcatcatcatcacataggtcaacataattatgttaaatatagtttaaaaattgaaacataataaacaagttcaataatcacactcatgaagcctaaaaatacaaaaactatagttgttatatcatagttttaaaattttaatattctcaaatagttaaatgagtagtgcagctgaaattttaactaaatctaaaatagttttaatacaaaattaaaaataaaatagatgttctacaatcaactgagaattaaaaccttaattttgtgagagtgattgagtgaacttgtgaaaactaagaaaagataaataatctcacttttagttattatgtatgatataaatagtaattgattttttttaaatttaaataataataataataataacttaatacaaattaataagccaaatcaactagttcatatattaaaatttgtaactaacccaaaattcaacaaattaaaatggattgagtgaatttgacccaaacacaaaaaatccaaactatttgaattcatttaagtcaattcaaatatgcatatatctaatattcataaacatccctacttagtattattcatcttcaactagaagaaagttaaacttcccaaatatttaaaagaaatgtttatctacttatatctttttttaagataaggatacccttaaatgacaacctcgtaccacaaactgaatcaacaatcggctcataacttgcattaacgatgaagaagaaaacgttcccataatggcctccaaagtgatagtaatagttaattgttggtcatctaacttgtggtacaataggtcaaacaagaggtgcagaacaatgagttatatatttgtaaaaaaaaaaaaaaaaaaaaaaaaacaatgagttatatattcacatcacccacccacccacggacactctcatgcaataatttgaatcatttggagacataggcttttcaagtaagcaaatgggtgacactagtttagttatagtcagtggtcacatacacatatggtgactttgcatatatgcatccactaataaacatcaattattaggggtgctaagtgggtcacccacccttgcatcattggtttaatttctattattgatgtgatgtccaaaccttgtgtttgtttcgttttatttgttcaactctttttcttacgcatattttttttagggatacaaaaaactagaatatatcaaattcaattgagttttaaatgttttagctcgtgtgaagtcttcattatacgtccatatgtaatgtagtattttaaaagtaactcgtgtcatactatagacataattcgactctaaatatatagagtctgaaccttcaaacagatacaacgttcctttttttcattaaaaaaatattaagttaatgaatttaaaattagttctaaagtcaacaaatctactataatggaaatttattatgggataatagtatataaaatgcatatccttttttctcaaataaaaataaataaaaaatagctattgcattttttttatataatttaacattgaatagtgttattttttttaagacgctcatttaaattagaaaggattttttccacacaatatttttcttaattacgtgataagtaagaaaataatctctcaaaattagataagtattagaaacaaagtcaaatgacacaagttaaaaaattaaatactgaagatatttaaaccccttcaacctgcgttgatattccgaaagaaagggatgtttggataagagattaaatgctcgattgcatcctttctgtgtcttcttttctatatgtatatatttcagtcaagactcgagtcctttctggtttttctttccagtgagtcctttatggttgactgctgcagagtaagctcggcccttattttatgggtcagagaattattaagcccatgtaaacaacgggctaataacccataagtcctcttaggaccacgccactagtttaattgtttatgcataaattcctttttaataaaaaatgctatggattcatatttgtaaagctagaaaaacaatagctaggaaaaaaatttgtaacgacccttctttgaaaaaataaactatcaaattgctcgtcaaaattacctatttctctactcttaaaagaaaatttcttttaaattataatcaccaattattaaaaatagtaattgtcacccatggtcctaaaacctttagttcaaattttaagatagtaaattgtagatttcccaaatataatatatttgtccaactacttattaaaatcgagagtagtttggtaaatgatttaaaaataacagtatttgttaaagcactgttatttactttatggcaaaaaaagcctatattttgcaacttgtaacatgcaaagtgcacagcctgagtcagcagatacacttggcacatgattgcatagtaaataaagtttcccggatatgagagggaatgggagatttgaagagaaaaggaaaagaggaaaataataagacaaattgatgacaagcactcacaaaagttcctttgtgtatctaaattagggaaggaaataggtttaacatgcatagagtcaatcactttggtctgacccgtttaattaaaaaaaaaagatttaagttttaaaaaaaattcatttagttaaataggttagacgtgagtttataaaaaaatctattaaatctgatagattagcatactaatttatttatatataataaaaattaatatatgtgtattatgcttttatatttaatattttaataagttaataattttatgtcaaataaaataaatatttgagataaaagactttaagtaaactaatagatcatactaaactttttaaaaaagacaaatcaaacttaaaaaaaaaaaaagaaaaaaagtcgttgatagattattagatcaaactagaccttaatttttaataataaatcagacttatttatataaaatctgatatatattttcactcctaatctatagtcattcaaacaaaacataatcatactgtgttttttaatgttacgaaacagataaaattaggagatttgattgagatttgaactaactcttaattaaaaaaaacacggcttaagattaaaacgccaagttaatagaagagaacaaaattttggtaaacatcaagaaggaaaatagctaatgactaaaacctcacctaaaataacagctcaagataacaattagtaataaaagattaatcactaagaacacaatgatctaatctgcaaaccaactccttctccaatctcaaatcttgatactttgtggatcccttggaaatatcaatctcaattaaattttcgtcctcattcatctcattaatttctgccaagagctctgtgagaccttgctgcttgaaaatggattctggcaagaactctgaaaagtggttgtttggaagcttgatttcaatcaagccatcctcctccccatcaacatcataatcaaagaccaagctatcagatatatcaagattttgatttctgttgcgatgaatctcaatactttcttcatccatggttgagctagcagtgctttcactatctgatggaagtgaagtatctgactgtggatcagcttgttgctcatacttccgagcacttagttcaaaacttgtatccatgatattgcttctttcacaatctaatggaaatgaggactctgagtgtacttcagcttgcctctcagaagtttcattttgttggatagtaacatctcccaatgaaggctgtaactccaaattgggttggttatcttggacaagattttcatgtagggacccttttttctttgccagtgtgacaagaaacaaggtagatagaagagcaatcagtagtgtaagaagggaaggagaggattcagaaactgaaaagaaaaaggaaattgaaaatagaaggacaagaactagaatgattggtaagaaactggcaaaataacaacacagattgtgacagatttgttgctttgttactttcaccatgatcattcactagaatgaacttgttgtgtcaaagccaaagcaaatgcaaagatccaactcacccaacaaagactgcaagaagtactgttgaaaaggagaagaagatcactgggaaagactacaaagaagtggctgaaaatttgttcaatctgtagttctgtacttcttttatgactttaaaatacagattgtgacacagcaaagatagagaaaaatttcaatgtgctacaaaggaatttgggacagtcaaaagagtcttttaagctataagttaatgctgataactttcagctcctaccctgcttcctattttgtaataaacagttgctaaaatgtcaaacagggagcaaaggagggaaaattatattttcaataagactcaaaagatcatggcttgaaccccaaagaaaaatatgctctttttcaccaaacctgacaagggtaacatttagtgacatctgatccttgaaagatcaagttcctttccactgctgagcaactctactagctaggaatccaactggcaagtgttaaccgaaccgtttcttctattttttttcctctgacacaaaaccttttattatttattatctgcatctgatcctcttggagatagcaaaggtgtttgttttccaacaatatttacaacctcaaagccttggatttgtccaatgcatgtgccagacatatctgacccctcccccacacatgccaagataccgaacccaacaaaacaaacttcatcaaaagagaactcaagaacaagaagggccttgcttctccctctattttactcacaaccaaacaaaaccacacagaaactcaatataccaaatcaggaaaaaacaacaaatttctcaaaacaacacttctttgtgggagttcttttgttgagacactttcctagtatgacatttccccccatcacatacatcaaagaaacgtttgacttcatattagttttttcctttcttttggtagcaatgaaaggattcgagtgtgatggcaggttgacaaaactttgctcctacaactacaattcctaattaacaaaggcacattaagtaatcaatattctgtaacaatgacccactttctattattgtttaggctcttgttgagccatgaagaagtaagtccttttctgcttcagcatgtcatgctcatgcaggctttaatggagtggaggccccattacagaagatgtctaaaactacatagttaggtattccccattactatatatcctgttccacactaggtaacatatcagctactaggacaatttagttacagttgccaattggtacaaggtttcaagagcttgcgtaaggaagacgtaggttcagcaacttatacagctagatgcctagattttgtttttaattagatcgatctaaacctactactactagtatttaatgaagaagactctttttatttatgtggctattttttatgaagcagaaaattaattaatacattttcttaattactattttatagtaagatggtgctaccgttagttttttttattcaataaatattaatttgttaattttattaaaaatatcgagatttgaaactatgatttttttttttttttttaacttcttgttcaaccttaaatctctttgtgctattgttagtgtgattatgtacgcgttacacatgctgttaagcgtgtcagtaatttcaaaaaaatcaataaaacttaggacaggtgttagaaatacaattttgtgatggataatgctcacacaattaatattatgacgtgtcagagtgtaataatgttgaaatattctgtcccataagtatatcaaatcttggtgaataattcgaagttttaaatggcgactgattaataatgtaccatatgcataggtgacagatgacaattactcaaggtgggtacatgcatatttctcatgtttaagcaaaaaattggtaagagacttcaattcatattatctttttattgatttctagaaaagcatttgcaattacatatcagaaacaaggtgaatgtccctgtcagtttttttacccttttttaccttcttgtattcaattattagccttaatcccctctcataatcatttgctcgtgcctacaaagaaatgatgttattatgagaaacgaaagagaacaaaagacaagaaaatcgtggaaacagaggccattcacaaaaagacatcgcatgactcaagcgctttctcgtgactttgattgtgtttcttggtggaaaatcttgttgattattatgcctactccttaatgattaatgttcttataaaagtctagcacttttcatcatttatttaataatattttgattttatgaaccttttatcaatattttgtgcaacatcatttgattaatgaaccaaacagaaatttagcaattgctaaaccgtgagattaaacttctttttatatgaaagttgggtgcaattttttttttttcttgggaaggccagaaaattttattgcaatgaaaaagaaccataaccatttgcacccaacagaaagccactcaaggtaaataatattatagaaactggattcgtgtagacatcatgcccatcagtccaaaatccatgtgcttaccatatttcatgtatccatcttccccccacaaccacaagcatgacctctcacgaatttgctgtgaatacaccatttatgtgaagtgttggatctattagttaatttagaattggtatatatatatccaatttgcacaagggtcagaatctgagtagtcaagaggaacaatataatctactacaactgtacaaaaacaaattaaatagaacctgtatgatgagtatgaatcagacacagatgcaaagagatgaaaggatccgagcccaacaatgttgtctccttaagacaatttgttccctccaattgatgccaaaggttgatgaacaagtgtctcccaggatagaacggatcaacgtctgaagattgatggcacttcaaatcaacagcccaaacgaacaaagctaatgcttgaggaaccacagagttatgtgatatggaaatgcactagtatctaagcgagaatatcagaaaagattaactatcaaaactctatcagtttttctgcttcttctttctgactgtctctgtgtctatttatagacaacaaacaaccctggtgaagagttgccggtaaaccatcgcgactcttggcgttgaatcatcgcgactcttggcgatgaaccatcgtaaccgttggttatcggaacggttgggagtagttattttttctaacctttcccaagagcggttaggagtagttattattttgaattgttaaccgcctcttattcataacccatggagtttaaataaaaactccaacaatcccccacatgaataagagatcaattcaacatgactaaatgcatatgaatatgtatgcaagtgtgattcctcggcgagaaacaattgcatcgagataggtaggggttacctttgaaccttctctagtgtaaacctatcgggtatactaggtcaatcggtggtcgtgatgccttgaaccgtcgacctttatggtgtataccgagacaataggagacacacaattgcttctctagcattgctcgtcctcattgttgtgtccattttggccgtggacaccttcctggttctgcaagtgttatagagaatcggcctttttaagttctcattgaagcggccctcacttcacactcacataggtgatttcttgtgatatacctccacatatatcatctgaacacatcagattaagaaaccattaaaagccgttatgcttaccctcatatacactgtattgtcataggaatgagtatgagtttaaaaactccacagtgtttaacagtcgatcaagacttagttgtctctttgaacctagttcgtgggatctccactcatcaaggtagagttaccgcgatgatcaacaattgataggccttaaacccattcctttcgacaaattttcaactagctctctaggaatccctttagttaatggatccgctatgttctctttagacctcatatagtctattgagatgattccattcgagagtagttgtctaacggtatcatgtctacgacgtatatgtctagactttccgttatacatgatgttcttagccctaccaatggcggcttggctatcacaatgtatgcctacagctggtactggttttggccaactaggaacatcttcaacaaaattacgaagccattctgcttcctcaccggctttatctaaagcgataaattctgcttccatagttgatcttgcaatgcaggtctgcttggacgatttccaagatacagcacccccaccaagggtgaacacatatccgcttgtagatttagtatcattagaaccggtgatccaatttgcatcacaatatccttcaataactgcaggatactgttcataatgcaaaccaaagttttgagtgtgctttaggtatcctaaaactcttatcatagctttccaatgatacatgtttggattactcgtaaagcgactcaacatgctcactgcataagcaatatcaggtctagtgcaattcataacatacataagactgcctaatacttgagcatattccttttgtgctttagctttgccagtatttttcaatagtcgaagactagagtctatgggattattcacaggagatatatttaaacttttgaattttttcaagaatttttgtaatatagtgagcctgtgatagagccaaacctcttgatgttctatggattttgatacccaaaataacatctgctctttccaaatctttcatgtcaaatttgctggcaagcaattgcttagtagctttaatcatttgattattactacccattatcaacatgtcgtctacataaagacagactatggcaaaccctttatcagtattttgaatgtagacacacttgtcacattcattaatactaaaaccatttgataacataactttatcaaactttgcatgccattgttttggagcttgctttaacccgtaaagggatttaattaagcgacaaactttccgttcttgtcctggaacagaaaacccttcaggttgttccaaatagatctcttcttctaagtctccatttaagaaagctgttttaacatccatttgatgtagttctaacccatacaacgctgctagcgcgactaacatcctaatggatgtaatccttgtaacaggtgaataggtatcgaagtagtcgagaccttcgcgttgcttatagcctttgactacaagcctagctttatatttatcaatagtgccatcttccttcatcttccttttgaagacccacttacttcctagaggcttagtgccaggaggaaggtctgtcaattcccatgtgtgatttgacaagatggatttaatttcactattgatagcctcttcccagaatggtgcttctggggacgttacagcttctttatacgtctgaggctcattttctaacaaatatgttagaaaatccggtccaaaggatgtagtggtcctttgcctcttactacgtctaggttcttcctctacaggattaacactagttgtagtgtcttgaagtctcacaacattatcattgtcattgccacttggttcatatatatcctcaaagaacctagcatcccttgattcaataatcgtattaacatgtatatctgagacatcggatttataaaccaaaaatcgactagcactactattaagtgcataaccaatgaatacacaatccacggttttaggttcgatcttcaaccttttgggtttaggaaccgcgaccttagccaagcacccccacactttcaagtatttcaaggatggttgctttcctttccatacttcgtatggtatgctctttgtcttcttgtgaggaactctattaataatatagtttgccgtcaaaatggcttccccccacaagttctgtggtaaaccggacgtgattaacatagcattcatcatttcttttaatgtccgatttttcctttctgcaatcccatttgattgcggtgtataaggagcagtcgtctgatgtataatcccagattctatacagaattcctcgaaggggccatcatattctccgccacgatcgctccttatagccttaattttcttgttaagttgattttcaacttcatttttatattgtctaaaagccacaagtgcttcatccttactattaagtaaataaacataacagtatctactgtaatcatcaatgaaagtaataaaatatttcttattacccctagatggtacatatttcatatcacatatatcagtatgtattaaatctaccaattcagttgatctatcaacagaagaaaaaggtaattttgaaaagtacagaaacactgattaatcacacagatcaaacagaaacactgattaatcacacagattaatcgttcaaaagtacagagagtagacaacagtatataatataaaaagatagaatatactgaacccagattcaatcaaattgtcttaagattgttggatctattagttaatttagaattggtatatatatatccaatttgcacaagggtcagaatctgagtagtcaagaggaacaatataatctactacaactgtacaaaaaacaaattaaatagaacctgtatgatgagtatgaatcagacacagatgcaaagagatgaaaggatccgagcccaacaatgttgtctccttaagacaatttgttccctccaattgatgccaaaggttgatgaacaattgtctcccaggatagaacggatcaacgtctgaagattgatggcacttcaaatcaacagcccaaacgaacaaagctaatgcttgaggaaccacagagttatgtgatatggaaatgcactagtatctaagcgagaatatcagaaaagattaactatcaaaactctatcagtttttctgcttcttctttctgactgtctctgtgtctatttatagacaacaaacaaccctggtgaagagttgccggtaaaccatcgcgactcttggcgttgaatcatcgcgactcttggcgatgaaccatcgtaaccgttggttatcggaacggttgggagtagttattttttctaacctttcccaagagcggttaggagtagttattattttgaattgttaaccgcctcttattcataacccatggagtttaaataaaaactccaacatgaagccaatctgcagaaagttgagtgcaattgatttcgagttgtaataccatataattaagataagtgtctaaattactctcaattataattttttacattcaaaatgtatgtcgtaataaaaataatttattactggtgcaaaataaagaggcctaagtactctacatatcactttataacattttaataaccttattcggagttgtcaaacataagatgattaaaggtggtaaaactcttcctaattaataagttttaacacatacattctttagattcatattaagagtataagttaaattaaaacaattcactcttaattagtttcgtactcactttatatataacacatagataattaaataatgatgaaatttaaaataaggatatattattatttattgtatatttgtattccaatttgtatttgattagaatagaatctatgaacaatacaaaaaaacaataaaattgaaatttatgtacattttccttaatatataagtaacaaagtaatatcaaatcacctattaatttaatacataaaattggcatttcttacacccctcccctcccaaagagttatatgatgaaacgaataaggttaaactaaaattttaatccttttatttttatttttattttattttaacttatgcattaaaagaactctgcatataaaatttcatgtttcaagtctccgtcaaagttttaccggtcttctttttaccatgtaagagtcaaaataaaaatgatattaattaatcttttatataaaaaagaaattaaaaaattaaaatatttttggaacaagaatcaaaattaaaatattaaaaataaatatctaatttaatatcattacaactttgacaaataaaatgaattaattcataaatattttttaaaaaatttaatgatatactttttataatgtttttttgaaagaaatttaattagatttgaatatcatattaaagttttaacaaggacattttttcatttaatactaaaatgttgatgcggaattaaaataataatatcatataaggacaacttttaaaaattacctaataaacaattgctaatctttatctcttataaactatcaattattctaccaataaaggaaaaaaaaaaaaatatactacagagaatcccacttgagaatcaaagtgacaaaactgcccttcaatctttaaacaattctgtccgaatcagtatgacatttaccagcgatcaaaccaaacaaacgtgcacagtgaaaccctatagttagggtttaattgtcctctcaatttccaccacaagaaagcatctttctctaatttgatttattttttgtgttttattctttcgagatttgtgtttgtgaaattttgctgctatctattcaatcgggctttatcgcccattcaaatccatggtcgtcagtttactatggatccctctcatcagattgaacaacaagaagacgacgagtggggtatgccatttttccttcaatttcgtctctttttttttcttctttctcttttgatctctggatgaccaaaccggaacagagaagggggaaattaggatcttttgtgttgtttttatttatttatttatttgtttctgcattagattgaattttgttgatttattgcatatatgaggatctcatttgattttgacaaggattggttattaattaattcactgctattgcttgagagttcgtcatgttatctggattttattttccggagatattgcttgtggcgctcggtgcttcacatccgtgtgtaaggcatattgttctagcttaatttgatatccagctgattcaattttaacactgtttgattttcatgtaaattagaggtatttagggtaggaatcataatgtcctagcatacagagaatttatcattgatataggtttgttattacatgttgacatgttgtttatgtctatacttatgcataaatatatttcagttttgcaatttattgtgctatatgttttgctatgaaaatgaaaagtctgtgactgtgttcggagttttttttactttctgactagggatagttgtttctttctatttagcaatgttgggatggcttctatggggacaaaaatgcttttgcttttgatgttgaatggttggacttttttttttgttgtagacactgatggatttgtgattccaagtttgggaattgaagactcagatcaaaataaacctcatgttcctgatgtagaatcttctaattctgcatcaaaggtcagctaaagaaaatttcctaatattagagactatataattttcaggttttagatgttgatactgacagggaagacaatgtatatgctaactatatttgtttgtgttctaggctaagaaggaagaaaacatctatttgggcccacatggagcgcctccttcactagcaaagcagcaagagctaatttcatctaaccggaagcaaaagttcaagcaaaagctgaaagaagctgacaagagaattagtgggatgggtagggagaataaagtggataacctgagggagcttgtgggtgtggggaaattaaatgtcaacaatgcaaaggaatctcccaaggattggttagatccacattgccaagaatctgagtttgagaggaggtaatgccctcttagtcacggtagattttgcttttttgagctattttattcttcgggattgtccacttaagcaccttttgttatacaatttgatctaatctatcgagacccaagtatgaggtcatgtacttgacaataaatttattaattagtgctttgataataaaggtattttgcctcatagtaaactgttcatttgtgggaattggagacttaccttgatctcaattgccaactaatcctgatcaaggaaaaatatcaaggagctaaggttcacctaccttattgactgttaacattgaaatctcatttaatgtaatatctattagttcaagatgttccaaatataagtcttttaaaacagaagttattgttattcattcaacaagaattaaacgatatcaacatcaatgacacatttaaatgacacatttaatgatacatgaatctaatgttagatacgaggagattgaaaaaaaataaaatatatatatatatatatatatatatatatatatatatagagattttgagatgaactattatgatataataagaattaaaggataaatgaacaataattacatgaaaattctttttgataaaattattaaattgagtgaacctcaattgtacaaattgtaattattactgattaaaaaattatacaattttcaataaagagaaactaaattatgcactcaatgcacatttacaatatttgttaaaaaaaatgtacatttacaatatcattcataactgttatgtatccaatgcaagtttttatattaaccattaaactcaaatttgaatgtcatgtcatcacaatatatattttaattgtccaacttcaataatttatgcattttccacgctattaaactttttttcaattcattatatgattgtattggacacttgaattattggtttgtattcgaagatttttgccgtgcactatttccagcttcattaatttcaaaacgaagaccgcaggcctaattcatccccgaactgaaatagttagttcgaattgaatatatttagtttacaacaatttggtcatcttggcctagttaataaaccaataaaccatgaagactaacaaagaatgagccgtgtaatacccccaaaacattgtattaataagtgtaatatcttctatatcaataactacaacaccctcagttctaacttctaggtgtccactctcatccaagactaagcactcaagcatatagcagctaaggcagtggcattaaattttatactctgaagaaaccttctcacttgatgcccaagaactccaaaccagttgctttctgtgtcaaaccaagctgagacaagtattcagcatcatagaatttgctcaaatgtctcattccactgtcgcagagaatggttacaattgtgtgaccagtgccaattgcttgcgctactctaactgctccaacacagttcattgcagaagaactcccaaggaagagaccatcgttcttcaaaagaaacctgatacatcaaaaacaacatatcactttatttcatcatttcttcaagtttgacagaaaagaacaaaaaaccgctaaaaataagaaaagtaggatggtttacaaaagagtaagtaacaacctagacatttcaacagcttccctatcggtgcctctaaaggccccatcaagttttgccattgcaaaattccttgttatcctgttaattccaattccttctggtatagtgtcaaatggattcttgagtcttcttccttctgcctcctctttggtgtacatcactcccctagttaccttcttaaacaaacaagagccaggaggatctacgaggaagcacttgatgtttggattcttttcctgttgaatatagaaccagaaataactcacataactttcacactcaaaacgacaacatctacaacctggaggaaggggggatgtggtgaacctgaagaaacttagaaacaccagccagagtaccaccggtacccgctgatgcaacaaatgcatctaactttccattggtctgctcccaaatatcaggccctgtaccctcataatggaccctgaagttcgctaggttctcaaactgatcagcaaaaaagccaccttgacaatcttcaaaacagagagctgtaattgcatccattagattcataaccatttattttctcggtgtcctccttgccattcaattgttatgaatttctacgcttcaatgcaaactcatttgcttcagatgctggtcttcttgcaatattgacaaaatggtctttgtgggtgatggacaccggtctcactctttcaacagttgccccaagggcttcaagtatttgagactgaaggttgattcatgcaacacaatcatcaattgtacacaaaatcttagaggtttatcgctagatttcataacagaatttacttgattacattacaatcattataaaataccttctcaatggcagcatcatctggtataaccacgtgggtcctgcacccataggcaggagcaacggtggcaatgctaatggcagtgcttccagcagtggcggagccacattgaaaccagcggggccatgacactacctaaaaaataaaatttggcactacctaaaagtaaaagctggctccgccactggcttccagcactcccttcagtgattattccacctggacgtagctggccagattctagagcctgcgcaatcaatcatagggacaatcttaaggctgatattgttatgacttaagcataagagggaagtccaactcaaaagactagttcatcaggttggagagcctcatgacttaaatatcacattaaacttcttattctacttgatgtagaactcataatttaaatcatgtgtgttaatatgttatcaagcagattccagatatcttcatatcatgcagcaagttgtgcatatcatgtaagtatttaagtaaacatagcatatgcttaggtgaaaataacataattgaggcaattatatatagaaggattgtataggtggtacatgtatatgtatatcagattgagaatgaatgaaaaattgatattccatccaaaagaaagcaattctgataattgtatgaaaaacagtgaataatagaagatgcgaatggttgaaataaatagatagagagcagttgtttaacctcatgaataatttgaacagcaacgcggtctttgacgctacctccggggtttaagaactcgcacttgcctagaatctgaagagaaataaaaataggttgagagtggaattggtaaagagaatggaagcgaagtgatcatagagaacataaatacttggcaaccagtggcggcggagaggctgttgatccgagtcaaaggcgtgttgcctatggcgtccaccagtcccttcttcttcttcttccttgattcgttcttcttcttcttctatcgaagggagaactatttttatagcatttttttcaaatttaaaatgttgttctctctttcttcttcttcttcttcttaccagcaaaaaatattagcaatatatagtccgaaaataataaatgatcatgagcaactagggcaacacctagcacgtgcagacctaagctcaaggaatgagaaaaaggtaacaacaagccaatgttcaaatctactatcacaccgccaaagtcatgactcaagactcgtgtgattctttcagtcaaacttttcttcatcaactaaagacatggaaatatagaggagtgcaatgcaaactgtgcaagcgtgtgagggacacaccaattgtagacagatgtactacttaggaagagtcactttcaattcataagatcataaactcatcactttttgaatcatcatttcaatgtgtttggataagatacataattgattttgggaacaagaactgtgtgtgtaatcgtgaattttgagaagcaactatgtgttgctcatggtcacaattttttttttcattgtgccaccactccaaatacgcatacaatgtaattgacagattttcataatcgattatggaattaaaaatcatggtgtgaccgtgaattttgagaaacaactatgtgtggctcgaacttcaccgtgggattggtcacaattttttttatcatgctgccactctagacacacactcaatgtaatagactaattttcacgtttgagtttgatatgtagctaaatttaaattaatcgaataatctctttttttatccaacttatctcaaataaaaatggaattaaataatctcattgcattttatgggtatacttaatatttgcaattaataatcttaaagtatattaatgattgtattgatcaatgagaatgtttaaccttacttgaagtgaattagacaatctctttctttaatttcattattctcagtaaaattaaaatgtataattttcgacttctgcccaggttcaacttataaaaaaatgaagtgtgtaaaattagtgtgtgcgagcattattaattttaagtaaaaactctagggaacaaaacggttcacacgtgaaccgaaagaaaaatgctaatatattagtatggttttggggggatcatgaactaatttatttaaatttatttattgaaataaatgtttattttaataaaataattttttaatgtgttcgtctaaattgtttatgtttaaaaaaaatattttatttattttaataaataaatacttgataagttttgtttaaattacaaatttcaaataagtgattatttaaggaatgggatttgttttttaaaataagaaaaaacaatttttgttcagacaaacatactaaaaaaataaaaattacttattttaacaaataaatttaaataaactcattgaatatttgtttcttaatttttaaaataaattcacccaaaatgatgattaggggagtgaaaaatgagtgtgttcccttgagtccaaatccaaaaaacgagcagaagaaacagttgttgtgtctgaaagaatctctgcacagaaaacccaaccctgagtcacactcacttgctccacaccacatggccatggagatcccagagaagttggtaaagttcagatactattttctcggggcactgctcttctctcttatactgatggccccaagattcatgaccctcttcgcctatttctggccactcttcctctccacagctctagtccttgcctttctcttcttctttgctaagacttctttacactaatcctttcatttaactctacggggctgtaatctaacactaattatatttacttcttctcatgctaagttaagtcatgtgaagtttcaacagatcaaagtcgctatctttatttcaaaagtattaatttaaggcgatagttaaatatcagtgaaattaatgagtttagtctacaatatcatgaatcaaaattttaatctcgtagaaagaggtgtgtagtgtacatgtggtgtcggcctcaagcatgattgtattagtagaaaactagtgaaaaaatgtcggttcatttaattaatgtttaaaaagttaaattaatcgcaacgagaatgatggtttttattcttaaaaatatactaatgatacgagggattttttgaatatttcaagcccaaaacagaattttactcgattttaatttcttataattatcactatcattggcaagctggcagctttcttttgtgttttgttaaggataactataactatgtcttgacgggccattttaacggttgagttgtgtactaattaatgttgttataactctcttagtttttccttaaaattattttagctaaaatatgaactgaaaaatggagttgcgactgtggcagagtctttttgagtgatggcagtgtttgagtgagggtgtgatcgtgaatgatgagatatgctcatatgccgtacatgttcattgacattgttcatgaaaaaaatcaccatcataatagtcaaagtttagcatctgtttagaaatataatttgcacttttcaaagttgaaccaaacaccaaaatttttaagtttgatcagttgctaatttcttttaaaatttaaatagattttggttgtaaattattttgaatagtattaagtaagttaatctaaataaagtgtattctttaatggtgggaatataataatcgttctcgaaagttatggaaccgtcgtagtcgacaatgcaccatgtgccatccatattagctgctgaatgttcatttgtcaattactagccaggggacagaattcagatgccctgaaaaagtaatattacggggagaaaaaaatataatactattaattaattaattctaaagtaaatactacaatttttaatccaaaaattgttattttaatgtggtattatctttgcatattgtgaatcatcttgttttgaagggagctaccttctgctatccactccactagtatatttggtaggacactaattaatatttgtttattttataatagatactcttttcgcttgagagattaatataagttatactttaattcttttgcatataaataaaccttttcaaattgacgaataaatatgaaagtgtgagcctataattaatcattattgttgatagttattattttttactggtgttttggtcagaaaaaaaaatataaatgtgtgtttcaatgatttttttacaacttaattcaacaattaatttgtaaaatctaaatattatttaatattttagaaaataaagtaaagtcttaaacacttattattaacttaaattttttatctaaaatatttatctcattttataagatcacaaaataaaatgtagatgtttaaaaaaggctattaatgatgttgagaatcgccataagaaaaaataatctaaaatgttcatttatattaaaactcatatataacatatgtttatcttttaatgaagatgtatgtatattttttttaaaaatgaaaaaatatgtaatttaaatatcgaacgtggaaagcgcaatttactctttttagtaataatctgttaatcttacactgaaataacccggtaagaatattttaaaatatttaactttacttaaagcgagagatgctgactcacttggagggagcaatgatattcatgcaaacaaaagagtttttgccaagctgctaatgtcagacaccaaccaaatttgatatgataagattgaattgaaacaaaaccaaatttattagtattttatgtacgaattgtgttgaatctatttatagctatttgtctttgcaagtgaatcggattatatgtctttacagatgggtataatcgtgtaaaagtgatgcataactgatagcataggagacaatgggtacgcaaatgccattatttttaagtttgaaaaattcgtcggtgatgttattggtggaccaatatcattttttgaaattgactgcagtttgcaaacaacaaacaagccaggaacctttctgatcagatcatatataaagggttaaaaaaccagtagtagtagataacaactggacaactttaacccatgcttaattttttataataatttgaaaagttgttttttagaaaataaaagtcttctaccacataagattctgaaaaaaaatctctcgtcttttttattattattgacgaaaaaagcctttttggatataaaactttaaacaattcaaacaattcttaaaggaaatttaaaaacatttttgggggtaaaattgatccaaactttggctgatttttaaaaaaaatacaaattaaataaatatttagcaaaagggggcgaattcaaaattatttaggaaaatggggtaatgcaacacgcccagctggggcgtgtataccacccttgtaacgcctctctttgctctctcgtgcttgattgattttagatgagatttcatttctgctttgtatttgaatggttttagttgtaaatttttcacggaaaatccttttcttcttgctctgatttttcctatcgtttataacatagacgattttccttcaccgcgatttatttaaatacagtttatcaatacaaattagaatataaaacagtccatgttacatgtccataaataaacggtccaaatacatatcataagttacaaaataaaaattacaacatctttacttcatcttcaatttaacatccatacacatcttcaatccaacatccatgctcagctactattgttcatctgctcgcccaacagattgggatcatcacaggtgtcaaccaccgacacaaaatagggtaagcatatgataaacatagtttgaataaaacatatatagacacagatggagaaaaccttaattagaaaaaccacataacttatacagtatacagaacaacatacatagatccatcatgagatgtatgagatgcatgctcatctttttatatgatgcatgactgagatcccagcttatcataaaatggtaccataatcaacatagtttcacccactctagtgaaacttccctccactctgaggggtcatagtcaaaaatagtttcacccactctagtgaaacctccctccactctgaggggttagagggtaccatagtttcacccactctagtgaaacctccctccactctgaggggtcaaatacagatgaactatgccatgacttgtttttatttcttatttacttttcaccatttattttatttctcaaaatctcagatcagatagttccacccactctagtggaacacatcacaaagctcaacatctttgaccattcagagcatatacttttaaacaacaaatcatcatatcaagctttacataacagccatatttcaacttcataaattcctcacagataaatcatagtttacatggaaaattccatagaaacactcagcaacacatgggaaacactcagcaacacatgaaataatacataactttcattaaagcaaccaaccacacaaatataattcaactcaacaacaaggattcaagccaacattattaaacatattttgttcattgtgacatattatcaaacacatagtgtgcaagctttaaatcataaaattctgtaaagaaaactatttaaatcttaaatttcctaaaattcaatataattctagaataacatggttccaacataattcctagcataaactagacatatttcaagaattttcaaaacacttttaatggaacttataaattttagtagaacataactactttaattttagtaaaatatttgtttttcttctaaaatacctataatggactcattcattaagttaagctctaattatttatatatcaatcattctttaacctaaaaccaagtcatttatccaagtaatcatgttcctagcaatctttatttctttgagacatttcatcaaacacttagaatacaagacttaatcaaatgaagcaaggaataatattcaaactaagctatcataaactcccccatacctttgcttttccttgccttagaattggacagccctttgtttccttatttgaatttgaagaacccttgctcttagaatcccttggcttttacgtgaggtattaaaggtgaaaggctttagttttgtttttggtaaagggtgaagtagaaaaaatggaatggaaggctttttagagtgattttgcacgtcctagctccctcttggagctgcccattttcggttccactccctttatatagtggtcttgctacaaaaatcatcttaagtcataacttttgatcgggacgtccgattgagacgaaaccggtggccacgcgctcgaaatcgagaggaagagccgctggcaagttcccaaaggggacttgcccaaaaaagtttcccaaacgaggcctctaagtgcctcaaatttgcgatttagtcttcggagccctaaaaaaaatttctgttctctggtattttgtctatccaatcagtgaattgcaatccattctttgtttatctaattacttctcttaatttcgaacgttttgacataaaatacgtcttcatcgaatatttctacgagaaattacgtctgttcaaagttatatacaccgtcgaatctacactacaattttggattatttatgcatttgttaaaccaatgtggattaattaactgttggatttggttaattgtttagggtttagggcattgggttaatgattaactgttggattaggttaatggttttagggcattgggttaattgtttagggtttagggctaaggcgtagtgtgtttggataactgcatagtgttgatggttttagtattaggggtttagggctttgggttaatgattaattgttgatgttggttaaggggttgggttttacatagtagtccttgtcatagcgtgatttgattccgcaagagccatggccacaagggttactctgagagtagtttgcgagaattaaagggttactctgacgaccatgagcatgagctgatgaagaaggtgaatgggagaaagacatgatcacacatcttctttcttggtctgttttgcatcttctctgtgtatatgatgatggacttggcacaagtggaaataatgtacgtcaaggttcttgcttttggaatgttttagtattaatagaagtgtactatgaatatcagagggctgatgttacatcttgtaaatcaaatttaaaatttgagctgtctaaacgacacttttgaacagacgtaatttctcataaaaatatccgatgaagacgtattttatgtcaaaactttcgaaattaagagaagtaattagataaacaaagaatggattgcaattcactgattggatagacaaaataccagagaacataaattttttttagggctccgaagactaaatcgcaaatttgaggcacttagaggcctcgtttgggaaaaatttttgggcaagtcccctttgggaacttgccagcggctcttcctctcgatttcgagcgcgtggccaccggtttcgtctcaatcggacgtcccgatcaaaagttatcgccttccgtaatatacgaaaaaaccgcgaaaatcctaagtccccttttttgcctgccacgtggcgccatgggagcaaacacgccccatctgggcgtgtttaaacacgccccagctggacgtgttgcattactccattttcctaaataattttgaattcgcccccttttgctaaatatttatttaatttgtattttttttaaaaatcagcctccaaactttacttctataattttgtgcactattaatagttgctcaaccatgaataatagcacaatttttcatctgttactcgggactaagtattaacctcataaagctttcgtaaataaaacgtttaaagccatattttttatttttggattattgtgttatttgtatgaaatatttatttattgggccatctctaataacgtgatattgataattaattatacgaaagtgatttgtcaaaaaacaaataaaatgtcttttgttttcaaaaaaaatttaaagtataaaataattgacaaaagagaaaacagagagaaaaggagcaataaaaaaaaatctttattttttgttcatgtaatgatgataagattggacttgtatttatattaacaaaaattgaagaaataataaaattttgttcatgacctagttttgctggcacaatccaaatgcattgatgcaacacattctcaattttttttttttatgtgtcaacacccacccaaaaaaattacatgtaataacttgggttaaatgtgttgttgatgttgatgttgttgaacctccaaatccgtgccccgagctcattctacttgatcgaagaaaaagtgtaaaccaaggaggaggaaagtgtgttttgaattgaatgttccaagttgatctatgtatattaagctgtaaaatacaaaagactctgaactgaagtgtaaactgttaagcttatatacttacatgatatgatatgtataagaagctcctgatcaagtagtcaataattcgatagcatgagactgaccaataagcgccagtccgttcaagaaatttcagattttccatcctcatcaaagctctggtgtggtgtgcattacgtgatcaaagtggaaaataagaacactctgcaccaacttggtgcaatgtaatgtgttagtctaagatgactgagcaagagttatatcagaaattgatagtgtgccagaatcatcaacatcaagctgtttaaactcctgcatcacaagtgatatatcttcttgactaatcttccccatctctttgagcttataaataacgaattccgcagccctatgagaaacaaaacaaaagatataaaaatgaatgaagacatgttttataattgatagtataacaatatatatgactttgaaagaatgctcaactaacccaacagtcccatcctcatcaagatctgcagcctccaaatctaaattggtcactttccttgtaagtacccacttgacaagttccttttgtctgatttcagtgtttagctcagcaatgtagaggaaaagctgagctaaagtaatagtacctgtcaatatccaaaacacagcaaatgttcttcctgcttcagttgagaaactttgatccccataacccagggttgtaattgtagaacaaacacagtagaatgcatcaataacatccaatttctcaaccgtgaccaaaaaaattgtgcccgcgatgatgagaatcaaaagaaggaaaaagactagaaataatttgtatcttgttttattggtctcaacctcccttaaaatttcagttgaaccaactttttggtgcttgcgcatggctttaactagcaaaaattcctgtttctcaactaagtagtctgctgctttgcttacaattagtccaatcaatgccatcccagagaaaacaaaagcacatgcaagtagttttgtaaggtggctatttggcacaaggtctccatatccaacagtggtcattgtcacaattgtaaagtacaaagcatcaagaattccatctgttttctgccccttaatctggttcctgacaaggtagaagattaaagcacctacacctaagtagactgcaagatagatagccactcttttaaagcttggatgtaaattctgaaatatggacgcactatggggaattgattcattgccatttgtctcagtaggaacaatttctgcttgaggagcacttctaaagcgggggagccttctcttgtttagctgctgtttagtcttttgagtcgcataaagtgataccggcagcaagggctcctttacaccattgttggccatgcagaggaatttagaaaacaaggatctgcaatataggacctgattcaattgcaaaacagttcaaactagcaacatcagtcaaataagaaagggatgtaaatgaacatccataagccattgttagacttttaagtatttaaatgatgaagcatgaaacataaattcatccaaagagctttcacaaaaaaataaaccagtatgctcaaatatatactataataataggtgccagagatcaatccaagttctactttgagcttaccaccacaaatgcaaaatgaaatcatttggatcatcacttacaactgatacgagccatatggatctcctaaattgcgtgccttcatttaaagaaaaggcagaaaatgcatccatttcttcggagctagtgactttgtaagcaaaataactaataggccataaaagtagcataatagcattgaaatacaatgaatttgcccattatgctctacatgccaaaaaaataataatcatagagcaaacgcaactagtgaactaggacttcctatttacctctcaatttcttaacctcaaattcaaatccattcaaattctaatgaaacttacatcagcctcatcatattgaacattcccagtttagttctcattacaaaaaaaaaatagaataaaagggccattagtcatctcacagaatttcaccatcacaagtattttcctctattcatgggcaatcctccaagacaaaaaagttcccataaacagtgacccaaaattacacaaacaagtcggggtgtatcccttcaaaatcgtaacttgcaagagccatccgaaagaaatgaaatatggttgaagatcacaatctaaaagttaaaaaaaaaaaaaaaaaacctccttgactaagacttaagacaataatgatgcattcaatttgggagaaactaaattaataaagtggatcagagttgaggacaacagttaatacttaaaggttgatcatgtgaaagacttatccaactgcagttcatgtcaaggagcattagatttccagaaatagcaacagtgctacacaagttcaatctaacacttttttgtagagaataaatctgcaaaatttaaaggtcatggatgactaatcaatagcaagtgaacaggcaaaagagaattaaaacgaaacaataagcagtggaaattccaatcaattatgaatcgagctagtaagagaaagacatgtgttgaactaagaagccaagaggaaaacaaacccatcacaataacaacaaatgtaattcgtaattgcgaggaaagttctaacctttgaagtggtttgttgttgttgctgaaggagatgagatttgagtatggcgaaggcttctgaaagcttgtgattcaatgcaagtggatcccatatgatctagcttctccataattaatcatgaatcaattccgcgttaaagagattttgtttatttaacataaaaacaaataaattatttgaaaaggacaaaaattaagttcccatatatgcgccccacttggcagttgttctttcgagtttcaaccatattttgacttcttttttaaggcttgttgtcggaaaagaaaaaggacatggtttcccatttattcatggatgactgccgactataaattgtttaattatattttatttaacagtaagattttattaaatgatatttattttaagaatttaataataaaatttattaaaatgagacaaaaggaacctacttagataagacatactaaaagatttattaaaataagtataaataaataaaaagccactaaatactctgaactaataacatgttaataaaaaaaattataaattataatcttttcaaagtaatatttacatttgaaagatatatatttatagtcttttcaaaattttgatgataatcatgttactaatttagattttacaattgcaactaatcagcctaatgtatatattttttaaacatattttaaagaataccaacttaagactaagaagttttaggactcgttttaaatggttattcagtgttgtgttcacatatgtttgcaattttctataattaattaattatgattaaaagattgttgaatagttcgtcaaatgaattgtaattgtatttttaatcaatatttttatattcatcatttttataatcagttaaaatacagctaatcgatacaaatatatgcacatatagagcacctctatcacaaagtgttaaatagaaataactctgtcaacaacccattttactagatttgaccatttgagagcaaccataggatgagagagaaaatgtttgagttgctttggtcccttggatagcaattgttctctacaaaaaagtgaggcccaaaatttttattttgaataattagagatacacaatatagaagagtaaggtatttcaggacatggacttggataatggataatgtctagcccctactctatccaatctctattcatttctacatggtgggtctttctttctccatttttttttcgtgtttttccttttgattttttgttttgttgcaaaaacaatagccaacagggcataagatgatctaatttgggtatattgtgagatacattaaaaaattggttaacttttttatttttaaagttaaaaagataatgatatcaaagaaaaatatgaacagctataaaatattagtattagatacagtaattaataacccaagtcccaagtgagttgcttaaatataaatgttgtttcatacaaagcaaaataaagcaatgtatgtaaactatgagaaaatagccaattaccaagtgtcaatgtgagtaattttttaaagtatcattggggccaaattaatgttagagggtattttatttttaccggaataaattttaaatttttatctaaaagggataaatcataataatttattactgacttctgagttttaaatcctacactatttactatttttattttttgttttttaaactgaagtggacgtaacttcgtaagaggctaggaagaaattggcggtaaagttgagcaattttttttatgcaaaattaaaaccttgatccaaaacaacttaacctgttcaatcaaatattcatatattaaaatgacatactgatttttgtttcaatgcagatcagccagtggttgaccaagcaattaatgatatatgtattcttatgcaatgcaatcaccgtaaccttaatacggtagtttttcgcactatcgtttttgccatttttcttttggtatggctcttggtggattttggtgaataaaacttctatctgagtttctgatatgcttgtttttctattatttatttgtttgaaacagaaagttatcaatgtttaaggtttaaatgtttgggatgcttatatttcttttattttcattttttgtaggtttctgcagggaacgggtacaaaatgagatcaccctcaatcttggaaaaattcactttgttgtcagaattttcttaataataataacagtagtagttttattttcacatataatactgtttcatgaatgtgtgtacatttttgtataaaatacaatctcgccactggcgtgtctaattttttttatgaagttcaaaagacacgtatttttatgagatcccctgcttttattcatattataattataatttatgatagtgagaaaatatgattccattaaacgtgcattattaataaggctggcatatgtggcattctgtcatcaaaattctcctctactgctgcagtagtaattattaattaattttctcaaagctgatagttttgccttttactgagtttttcatattgtaatgatgtgtgctaatgtgtttaactggcaagtggtaagacttatggatcaagtttgtttctgctgtaggttaattatgggctggataagattcactgaaggagaaaggatatttgattgcataagttctcccaacactgtaagaactaagaactgatcttaatgtagtaattatttttaccatttaaattatatgcaggcatttggcttttctgcaggcccaccatgttcctgttcacgttgaagaagttcaaggtatcctattttctgggtgaaaatactgcaatcgtttagtttccttcttataattttatttggtacttcatattaacttaaaatgcaaagtgattcgaaatggagagaaacgttgcttaaccttgtgcatagatatcattagtgttgctcaatacatattagttgtggagaaagaatcaggtaagcaaatgcttttttgttttggagaaaataagaggaaaaaaagtacaagattcttccccaacttacttcctattgaaaagaccgtccatgttgaacttcactttcagttttccaaagactagcaaacgaccaattctgcaatgcaaatcgctgtattgtcatcactgtaagcaatcttctgaagacattagtttcgtttgcaacaatgtttctttgtttgaattctatctttatacagggaagaggctacccggatattcctacaagaaggtgcgaacttttgttttcatttacttgccagcttgccttttcatattgcattgcgaatgtgtctgtttgtatcctaacaggtttttgcggcttctggttgagaatttgcgtctacctgcttattgtttggtagattgtgatccctatggctttgacatcttgaccacttacagattcggtacaatggttagtatttataagtttattaattaagatatacatcaacatgtatatcattatagggatctgaatataaaatgtacaggatcattgagtcacttgaatctctgtaatggctgagttaaagttcatatcctgcctgactaatctattccccacgattatgttagcaaatggcgtatgacacgaaacatcttcgtgtcccagagatacactggcttggagcttttccttctgattctgagagatattttgttccaaatcagtgtctccttcccttgactgctgaaggtaaataaggatattacttgtaatgcgtcagatcgacctagttacatatctgatcttataaataccgtggtctcaacattccttctagacaaaagaaaagttgaagccatgttacttagatgctaccttcaaagggaggtaccacaatggaggtattgttcatatacattccaaaacatttgtctttttcttcaactgtgtatcttattgtttgttatgaaggttggagctacgtacagttgatactgcaaaaaggagtaaagtttgagattgaagctttatctgtgcacgcattttcattcttgtgagaggcttacataccaatgaaaattgaatgtaaattgataatgtagcatgttggacatctatgtgtcaagctctgtaccagcaactggactagggcataatcagtacatgccatttgttacgcattctggaagattaaacgatttcttgctgactcgcgtcccacacaaagttattactcgtgtctttgttttgtgttttcgaaattccgcttgttttgcaaatggtaagtttagttgtccgtgggggaatgggcttattggcatgtcggggtagaaatgggtctgtctaggatctttgaggcaaatttgtctacccaatttaaaggttttatgaacatcgaacagggttttatgttataaaaaagagagggttttataagcaatatggaacgtaatggtcttcggcatttatttgctatgatttggggttcatgccaaaattaaagtgaatcctataataattatgtactcataatgttatccttttctcacgggttgctcataatatcatctataaacttattaataattttctttcattttttttgtataataaatttatacaattttgtgtataaaaaaaggaaagatataaagaagagaacaagaagggtggaataagataattaatgtaatagaaatagagagaaaaaagtgttaccaaaaaatgttatacaaatagtatcctcttattaaaatacgtacaaaagttgtggatgcacgtaagtgtgcaacacaagttagaaaaataaatcctattaagttttccgagatatacttaagttggccttttaacatgctttgttagacttaacatcacatatgtagagtctaccgatgctagaatttagaacatctcagaaaacactagtagttactttcaagagtcccccaaaagatgtcgtgtacaccacgtgtgcactccacttagatttctattcatgtatttgctttcaagcgcattattgacataaaatctgtgatgtaaatcaattgcaagcatacacctcccagttctcattctcttcatgagattaataactctattttcaaggggctaagccaccgaattaaaagaccccacttcattattttgaatatatatagaaatgcattattggtatcgaagggacaatcatatctactgtcatcatcaaggtgatttatgaacacaacttcatatgtttagttttacacatcaaaagcgacttcttctaagccaactaatcaataattttatctgtgagaagcacccttgccacatgatatattagcgctcacttggacgctcatcttccctttttttatgtaacaatatacatgcacttttccatattcttcatcttggatttgctttgtttgtattgtattaattattgccttatttatgcatgcatgaatcggtactttgtaggacacaagaatagtagtttttatctagaaggaagatatctttagttagactttactactattatgtagtttttgtctcgtgagagttagtcttagtcccaccaagtttggcagggtctttccagatctcacccaccttgatatccgctctacagagagaaatatcaaacaaaaaacctttcactttcgagactgacttcactttggtagggaggatccacttgggacttagcttcatttgatcaaaatccatttaaggcagtgaaaatgaaaggcccatagttttgtgtgccttatcagtgtaatgacatttatgaatttttggccatatgtaccatagcatgtaattgacaaacccttgtgttgctttcagaaataaaaaaacaaaactctctctattcttatgctgttatactaacttactgtagttgtttcaagtctctaagttgtactattcccatataccatgcgttgtccttgttgtctttatacatgaatagatattagcaacttgatattgagcacagaagagtaatccctcaggttttaggccgtctaggaccatatttctcctggtcctggcacagatatcaatatgggatggacaacagagaatatcccagagctgtaacatggtctaatgggtttgactttgagatcgaagggtccagaaaatggtagtgctgagttaaactttcgggtgaagttacattttatgtgtgggaatgaaggtgccacatcaaagttacatttttgtttacagtgttatgcaaaagtgaaactgtagataaatcatgggggtatctggttgcaaagaaaaaagttattgcatgctaagtttgattgatggattctgttccttgcggatgcattatgcatatgaaaatataggcattaatatcacttaacaaacctggctatacttaccactcagaaatttcacaacagtgtcttgttataggctataattgtttacaaaattaatttttggagacaaaatgcctatttaacacctaataaaagacacaaaagagaaaaaaatatataatatgataagtgatataatgtaataataaaaaagatagagagaaatgatgaatatttataaaatgtttgaaaaagttggatgtccagatatcattgtttttgctcaattgtttaagtgccttcaacttcaagagtattatgttacctaatagcgttaaagggcaaaccaaaccaaatggtgtgtaaatacttgatagataagtatgcgggtagaaattaaatcttaagtgtatgaaagaacatatattagaagatgttagttttttaaacgaatattaaatcataccttgaagaattaatctatgactcttgactagagaatttcttggattaaattaagaaaaacgtttgagatttgcgggaagtttttgtttatcgaatttagaaagatttcccaaataagatttctgtatcaattctttgaaactgaaagaactgtgtcaactatgtattgatatattcctgggccatcttccgatttgatatttgtgaaacttcactttcataaggtcgtcttatgctgggtgcatgcaatcattgacttgcatttgctcctagtcctagccactttgtgagacttatccatacgtgcttcaatctttctaaagcataaaatgtgaattttccgtgttggatggaagtaattaaaaagaataataactaaaggacagtgcgttgagacacagtatcgttcgttatagataaataactaggcatggcagcgggactcgaacccgtgagtacctgtccgaatccgccccgattttaatagaaaaaatcgaatttttcgggattgggtttggattcgggttttccccggtagccaaaagcaggggcgggggcgggtatggggttactgatacccgccccgcccccgccccgtaataaataatattaaaaaaataaaaaatattattttctatttttttaattgaattgattgattttgttttataattttaaaattatgatcccatattttaaatctggatttgttattattatttttttgttacataattaacttttttatccaattgttcaataaaaaaatatattatttttttatttttaaaattttaattaaatagcgggagcagggggtggggcggggaaaatccgacccccagcggggacggggatgtggatgggttttaaaacccgacggaaaacgggggcggaggcaaagagcggatttgggggcgaggacagagacggagaatgcaatacccgccccgcctcattgccatgcctataaataaccattcataaatggctaaacatgcaagtacttacaaaagacctggtttttggcatagtatgcaagtatcatactttataataaaaaaattcccatagctactatgtgtactaaaagtgttcgatcttacgaaatttatacaaatgatcatggtttaatattattgtagggtgtaaaaggtgggtttctgacagacattaacaacgatagtaaattgtagatttcatgcatgcatacatcttcataataccacttatcactaactaaaattatagtagctctcacaaaagaaggaatttaaattaaattaccgtaaaagtaattacatttttttaagggggaaaaaggcctctaataaaccaaatagataacttaaaataataataatataaataataaaatcgtacagttttgtactttgcattatctttcttagctataagccagtacctaactgatgggctgacctgtatgaatcagatttgtgatcgtgtaccatttgctctggctaataaaatcgcaaatcattttcaattattcgtaatactgttggatcatacagaaaaagactgtttaagttcaaccacagttgaacaggttttcttcgatctagataccacgtggtctcatctttcaacaactaattgaacatgttgctataaacatagtatagtactgacattcttcttaaatatcaatctctgttcttaaatcacttgtttgtttgcattcagattactaatttttctttaataaaacaattggaactatcaaatccactctcaaataatttctctcttgcatgtcaagctacgacaaaatactgttgccagagataaaatttcggctgaaatgttacaattttttttatcaaaaaatacaaaataattttttttttccttttcaccctattaagatcatatcttatcatttaagaacaacagtatccaaatttatttctatttcgatgcatgacatcatgttattaaatcctaacagtgtatcgcatagattaaatgagtttagtggaaggggatagttttgattatatactcaaactgtgtcatatacgcgaatttacttcattaacattgtgatcatgtgcttggtttatgacttcaatttaaacaaaattttcatatccaaagcctgctctttgttgctaccaatggcagaaaagcatagaaataattttggaaaatttcaggggatgcatactacatacaactaaagtacaagaaaagtggaacataaaaggagaaagacctaacaaataactaggcctccctaagaaagaaaaaaaagaagaccatggttgttactaaatcaaaccatgactaattgccgttgagcttcaattcttagatcttccttcatctttcgaatgaaatcttcaaactttttgttcaactcctctgtgctcaacatacagctttcttcttcttcttctacattttcttcctcatcttctatgctttcttcaatcagaatgtaatcagtttctgaccctttatcttcctcttcatcatctacatccaattgttcagtttcttcatctagctcctccttctcctcttctttcaaaaccaagctactttctttttcttgtccttcatctaccaaaatgatcttctcaatgttttcttgtacttcttcttcagcacagttttctatttctattacttgctcaactgcagtgttctgttcatcaggctcactagtttgttcctcagtttctactatctccaacattagctcgttggcttcaataacccaaaaccgagattgtgaaccatcatctttaatatacgtagaaggcttattatcatgacaacaactagacctggagagagatttagttataccaacaaaaacaaggataccattgcaaagtagaaacatggagttcttgtctatgttgtgtgtataaagttggaaagggaatgtagagaaatagaatttgaagtaatgtaggaaaacaagcaaggaagaaggtgagaagatgaaggaacacacggatactgaaacgaacaattgagtaagcttaactagatagtaatgagcttttaggtggtgagtcatggttgctatattttggtttttaagttgataatccatagtgtttaaaggaaattaaggaaatgaaatgacactaggaagggttggtgacacaggttctgtgagatggtgtggtttggtgtatgagggaggcctccttatatacaatggtggggtgagagattctatttttgggtttccaaaaatgcccttggatggaaaattattgtgaggcagatagcatattaggctcacctgctctttagagactttgtcaattgtcatgaagggtagtatccagttgtcagagtactatttgtaacagaaattgacaattgttttcttcaagttcgcctgtttgaggttttctacatgtcaagtggaatttttcaaagtaggggccatatagagagagagaatgaagcttaggaagacaatcacctccaaagtcacctcccactttaatcccataatataagtttaaaattaactgctcaatgcttatgtactgagtaattgtgactgttggatacagtgagtttgtgtttcagcgttccctatgtgagttatttttcatttccgcgtcaaaaatttaagaagatccaaaagccatttagatgcttcagattggacgtggattacaaatgacaaaagttaaaccaaacatgcattataataagtggcaacaatgatcaattgatcaaaccacataccacctgatacgtatattatatacaattaagtgtggagattaatttttttatggctaaattttactggatcttaaggagtttgttgatgcagaatataattgagtctgatcataaaaaagattctgagtatggtccactcggagacgggtgatatcagtttcagtcttcgtctctggaaattcaaaaaatcggacttctctttcctcctcctcgaggatgatggatccgtgcgctttccagaggcgaaaactgaaactgatatcacccagctccgggatattaattgttgttaacaaaagacctatgattcttttcattttttcattttttttaactatctaattcaccttatattaagcttgatattaattgattttaggttattttaatttaattaattgtttcaagttcgagttcaaaaatgacttggagagaaatttttgctttttataacttgatacaatttacaacatatattaattaatagaaccactttaaggttttaatgcattatcttgatgaattgttgcaaaaatataacccaattatatgcaattttgtgagatttatgcgaaatttttaactgaaaaataacacaacaaaactgcacttataaacttttttttcttttatttttcacttatttagattttctcgtgtacagttgaactgtttcgtggaagggttgtctgtttgtaggccaggccttgtttttgattgggcgggcctttttatctgttgattcgttcataaaaaacacaaccaaagaggaaaataaaactaaaacagtagaataccctaagcacaaccaaagattaagaagtccaaagcacggcttagcttacgaaataagaaatgatggaataactggtagccaaacagggcatagccgaagttgatgggtggttctacttgtttctgcaaagcacaagagcaaaaccctacttgaaccctttctttcttcgtcactgctcacaaacatcacaactatgtcgttgggaattcttcgatcgccagcgatttcattggcatcgaagcgattcctctgcaccaatgccgcttccgcacctctcccccctcctccttccgccgcttctcccagccgctggaacttcctcaaatacgccgtcgtcggcgctctcaccggaggcactgcctttgccggttacgcctcttacggttcgttttccttcatttccattttcagagtagtcatttagggttgatcgacagaatctagtaacatttttgtgtctgttttttttttttttcctttaagtcggtgttgtcactctgatgtgttagggttgttattgaatcattctgatctggaaatgacgttggttgaagatttttttttttttttggaatgaaacatgcagcttacagtttggaagaagtagaagagaaaacgaggtcgtttcgtgaatcggccaagtacgctgccggtgatggagccactgctctcgatgtcagtattgaatatttctcaggctttcttcactttcattcttctttgctaattctatgttttagaatcatattgggggtttaaatatctaacctgaattgggttgatgagctggtcattggaacgttgtttcttgttatatgaaatgctctgcacatgctatgaatttaacgtttacatttgttcaacaaatttacttttggctccatttcattgcttgtatcgtttgcgtgactgtttcgtcgccctacgtcaaaatatacagtggttttcttttattgattttgtaaaacactttagtgatatcggattaaatcctattattttgcttcgtggaaatgccctcagtggaccttacttttacttaatgttggattctgcctggttttgatatgataatgataagtttcttaagtttaatgtatagtaaggtgacatgttctagtccatatcttgtgcagaaatttcaaggtttgctatactcaactgcaatgacaggtgtgttccccgagctttattccgtacacacttatcctgtattactgttattatgttcccttaaataagttgtgcttttgtttcttcacgtgaacttttgttcccctgaagtgttgctgttatatgaataggaaaacttgagctcgtcatttagatggttctgtatttctgttttgtgattttatgaagtgctctttgttatcgataagcatggacatctttttaattttactcaactgaaaaatagtatgtaaaggtcccatggggaaaacactgtttccattagtattaagtgcgacaaatgctaaaattaatagtcattttcaaataaaccataggtctgcccaatcatagtcattatatgcccctacttttgctgcagaaaaatattgcaaatggatgagaatgtgggatataagcatgtttgttgccaccacctttggagggtagggggtagaaaaggaaagtgagcagtggcaagaacttgttgtattgtagatgttgaagaagatcagtgcagacaaattagcattgtatgcacttcttgggggtgggggtattcaactcccaattagttatatatatgcatgccttagacctctgttattaacatcatgctgattcttttgcatgtgataccccagtgcctgctaaagcagtagagctttatttggatgcaagaaggctaattgaagaacaagttagggtacgtgcttgctttttaatatgctgatattggttttgacacttgtcatttaaaataaattatatttccttcctttgttttaatactgttctcttttgcttttttttagagttatactgaaccatacacagacaagctccttcctgatttgcttcctcaggagcaacatgtgtttacacttgttcttgatctcaatgagacattgattcactatatttggacggtaagacgtctactgcaaattcacccttttttgttggtagaaatttgataaactcctcattattggttgaaattcatgttgggtgactaaatcagtagtaggagactaggagccactaaatagggagtaagactcatgaatttcaaccatcagtaaagaatgtgttgcttacattccactttcctttatgtactttatgtcataaaaaatccattggatctctttttgtcttgcttcttgctggaggtccttacatattatagaggtatgactacaatattgaattttacttttatggtatgtaaagcgagatacaggttggcagacttttaaaagacctggagttgatgccttcttggaacatttagctcagttctacgaaatagtggtgtacacagatgaacaaactatggtaatctgattcttctctatattctgaatggatacttactcgtataggtattcatattcatatattcttacatttgttgatttgtgcagtttgtagaccctgttatagaaaggctggataccaagcattgcattagatacaggctatcgaggccagctactaagtatcaggatgggaaacacttcagagtatgtgtttatgttcttacattattctcttccagaattaattatatacataaatacctgtggaaggagtacaaccaatcatggcaaataataagaacaagtgccttggaaatattatatttttatctataaaataatagcgaagtaattttgcttacacctgaagaatataaaataaaagacctatggttttattatgatacttgatacatcacatgcatagtgtactagtggtgttctggatatttttataatgagttgttctttcctttttccattgtttgcttggcaggacctctcaaaactaaacaggaatccaggaaaagttctttatttaagtggccatgctttggaaagttgcctacaacctgagaactgtctccctattaaggcttggcagcagcaagatatagatgacacagctcttttggattttataccatttcttgagtgtaagcattccttaagatatattgaagaatgagttattgtttgaattattgtttttattttcacatcactccttgagtgtaagtccattcccttaagatgtgtttataaatgaatttatgtttgaagttactgtggtgactttttatgcttgtaaaagttgcattaccttctctgttatctatttgcagttgttgcccgtagtagtccacctgatataagaccagtgctagcctcttaccaaggatgtgatattccaagtgagttcatcaggcgttccaaggagcatcaaaggtagtatttaatcttttacaaaccttgaagattataatattttcagtatttccttaactaaatttgaaaatacaaaatttcagtatagaatttgtgattataacaaaaacataattaataacaagagaacaagtgaaatgcgctcttaagggaatttggtttgtttcaattcagttatgttttcactgatagttatgagaatttagtgtttttactgagttcatattggtggttgaaggtttcttttgtgtatatagctgacgttacactaatgatttatcctgtgttgtgttcaacccacatttttactctgggtgtttccaaatgatgcaggagaatgcaagaacaaaaaaatcgtggttacttctggaaatgagattcaatttcattgcaagttgatacaaatgatctttgttgagggtagataatgagattgtctgtttcattacaagttgatcagtcagttcatccaagattttgaagtcactgcaagttgacaagtgattaaattaaatagagaaaatgtagattttgttttacgtaagtcttgcatctcatgtcttgaaccattttttcctttttgcctattgtaattctgttgctggaaagcacttgttaattttggggatggagttctcaatggatgtttcttgcgaggtgatttaaccttgagtacatctctgcgcagaagaggttatggatgaccataaactaaattgacatgataaaataatttacttgattttgttgtttattttgttggaattttctgttctgacgccttgatctaggtacagattcttgattttgggcattcattgttatacagtgacgtatataagctatatattattgattacatatatataaaattagagataagatctattactttactggtagaaaattataaaatcaacaattattttcctattaatatctttcttttttatataaagaaagtgttgatggaggggggagactagggtccttttttgcccccttgaatctgtccctaatccccagtatcacacgacacaaatgaaagccctttaattattaatgcaaaattatttatgaaatagatgaaaatgagattgaaatttaacttttaaatactaattttgtttaagcatattattctgttttatatataactttatataaaaatttcaaataaattaaattataaagtgattttgtggcatattttaatttcataatgagacaacctcactttttgtttaaatatagtttataaaggtaatggttaaccttacttctataagagaggcatttcctttgcaaataacatgacaatgatagtgctttcatattaatatcgacaagagtaagagcacgtcaggagtcatacatataaaaaaatcccttgcaagataaagagtgagcatcaaaattgatcatttgggggatacgtaacatagtaataacaagcatataaactaataatgaataattgtcatgtaattggtgcatcataatgctacagtctgagccactggtctccatctatgaagctcttgtacaggaaaggacttgcttccggatagctgaatgattttgaccaaggcaccctatgtcttctatctgctcctcttcccttgcattgatactctgcaaacactgcagtcctgaagtaccatatatgcttagacatattctgcactatgaattctagaatggaataataatgtcatatttaaaacatagagaaaaactagcaacaaactttactattggttagaatgtattggaaatcacaatttgtagtttctaatgaattttaaccaataatagagtgtgttaaaaatatatgttagaaattgagttattagtacttggagcaaataataatactatcatacttcttcctatgtgaatgattccagtctgaccacccttgaggattaataatgccatccatattacatttggagtatataattcttgagtagttcccccatgctctgccaaggtatacactgccagatcctctaatactgcaccctacaaaagaaaaacccgtgtcgtctgttggtgaatccctatgatgtgctgctattgctccatagttctcagctattgactgaagacgacacttctgctccatagttctcaaggatcagaattaaattcaataaacttggtcactagttttgttttagtaacagagaaaaaagttcatcttatatttacctcatagagtgattttgccctgccacagataaaatcaacttttcctatgatgcgacactttaagaagtaatgatttcctgtgttgtccaagagagtgtcctgtgttcccttaatcctcactcgatagaacattgcttttggactgcttaccctcagtgccactccttgcatcccttttccaccagccgatgcaatcactgagttctgcaaccatgcacccaaagattggcatttgacatagtccaaaatgcacatgccttgtgttggaattggatttagtgcagtcacttttccacacattcagtacatttataaccattgaatgaaaattggactgactcagatttttaaatgtgtgttttaagttgattgactgagagaaaataagagtcgtttaaggctgaatggtcattttggtatctgaaagtgtatagtgattctaagttagtccctgaattcgaataagttaaaaaaaaaaaaaaagaaatccctgaaaataacttcttacatttacataatttgttagtttcaaatgttatcattaaaatgcagtttatcccttatatgtagggactttgcattttaatgataccacgcaggatctatatgaaactaacaaattatgcgaatcataaaagctaatttcgggaactttttctacatttatttgaatctgtggggactaatttggaaccactgtcgtttaatcttcacccaatagttctgaaatgttgaatgtgttgaaaagtgaatgcagggaatccagggtaccaaaaattgtgtgtccttacctcaaaagtgatcccagttgcacagaaataatctgagtccactcccactgttgctgaagcataggtgcccaatgctgtgccatttgggcctttgtcagatgacttactgttccaagtaataataggacttgcagttcgatttcttttccctataaatgatacataaggcttggtcacaggcacacgcactttttctctgcacaaattgcatatacacaaaggataaaataacataagtcaagtttttaatgataaaaaaaaaaaaatgtaagttcaaggccttgatgactcatgaaattttaggaaaccaaataaatgtaactgttggatcaaaaacaccaaccaaacccagctccgttaccccaaaaacaaaaacaaaaaatgtattttttcaaaaatatggattaatcaaggcaaacaattaaaacaacttcttttgattagaactgaataataatgacacaatagaatctaattgttaatccatgtattttatcatcaacttgatgaattaattttaaaatataagattttttccattatagcagactgtttagaagaatttcctattttttcataaaatattttgctttttcctgatactcgggttcaaatatccatggattagatgtttgtttactggcttcatataattcagaaaaaaaggacaaaacttagattttggagttgttcttcgatcaaaatcagagtttcacctcaataattcaagttgacaatttaatcaaaatctttagcatatggattactgaaattgaaactccatttataataataaaacaacacccaaaaagtagtatgaaaaaatatgcagttaagtactgacctgtaaattcctggaaaaatgtaaattttgaccctttgtctgttattatcaggaaccagattcacagcaccttgaacagttttggaatgtcccccaccattctggttaacagttataacttgaacctggttatgggacgacttcacggccaacctttgttcatccacctgcaaatcttcccaactaatgtaatttcgaacagcaccaccttctgctaaatccaccacctgagcccaaatcacgaaaaccgaaacaacaaacaagaacaaaactctggaagacaccaaccccatcatcatcattattgcgttgccacgcaacgaataagaaactcagcatgaaggtttgtgtatgttaaaaactgttgatgatgtgttattattataggagcaaagtgggaaaaagaaactccaaaatgagaacaaaaagcttgtgttactgatgaatatagtagagtaacggttttagagttgaagcgtggagtagctgattgcaataaatatgcgagcgttatatatggtgataatatacatacgtctgttccaatcctgatatattaggcatgcatctgttgatgttgttattatatatgaattataaagaaggagagtaatagctaggaaaataaacgtggcttttgtttttttagtttaatagaagcaacataaaaaaatcttttttttcttgttttaagaaaagttgaataacttatgagacttgccaaatgcatcagtagaaatagaaagagtgttgagtaactgagagtgtatttatttttatagaagaagagcggttatagattcatggggtgcggatattgggtgcaactgccccccactatgctcttctctttgttttggtgaactggttttggatctttctctatgcatgcctttcaaatgttctttttttccctcctttgtgtatatactaagtgcaaaatactcatgaaggcatggaagttaactgtgaatattttttttttttacacagtgatttgttttaaaaaaaaaagataaatgcagtttgaagttaaaatgaaatgttataatggttactgatttttaatagttggagataaaaatgtcaaaaaaaaaaacaccaaatagagttattttctttatgatagttatagaatcataaactactatgttaattgtcaccacttgttcaattttaattttcgtttagcaaaaaattattttgacattttgaattaataatgctatgaatgatgagattttggacaatcttgaatgtttgattttcatctggtaatagatgcactatgagatagattttttaacttatggttcagctacttctaggattaatgcgaatatttaagtgtttcctgcagagaaaatgttcagttcatgataatgattttaatgaattaagaatgtggtccctcctaaacttttgtgtgggctgtgacaaagtgacacttaaaattattgcaattgttttgtatacctatacctatgagatgagacgatgggatcaaatacataaaatgcaagtgaaattatttcatcaatgtaaaaattaatagatatttatggtcgtggttgactttaatatattggaaaccattttaaattaacgtgtgttgagcaattgtcctttctcgatcggggagtggacacttatttgatttttgggtggtaattaacatattgagttatttaaaagttgatcagtccattcattattagttaattacattatattcatatcctataattttcaattaatatttaatcaattattgggttggattgcacataaagaaaatagattctaatagcgtgaatccatttctttaaagtggtagtgaggaacctccacctgctttattagaaaacataacaaatgatgggattgaaaataaggacaataaatgcagctattgtataatcatagaaagtggcggattaaaaaaaaaaatattaagtgagggttaaaaatattctgatattttctcaaataaaaaattatatgttttattaaaaatgataataaaaaaataaaaacaataaaatttaaaaggataattaggtaatggaattaattgtttcacaaaaatatttttttatttgaatatattaaataaatattttttactcctataaaaaaaaatagatgttgtcctcacacaataattttttaacaagataaatatgaatagttataaaagataaaaaaaaattgatattaattttatccactttagcttatatgtagatatgtcactaatcatagagagtttgtttgaatataaaattagaagtatttttgagagtttttatacgaaaaaaatactatattttcattaaaaactttaaaaaaaatatttctaacttgtattcaaatatatatatatatatatagagagagagagagagtatacaagagttagaatataaaaacataagtgcgctgaagagtgacgatagtgaatatcaccttaatttttacaacaccaaaaatcatttcaaattctcccttcattacagtccttggccatttaaggtaaaaacaattaataagcttcactcatgagtcacgagttgatggtgtcatgaatcataactctctcacacacacgcttccatcccccgttatattataggcaagaagttgttaggctcatagattcacagatatgaatttgcttcatttacttgttgtccaccgtttcacataagaaaaataaaggaattgcttattaagaacagtaaaaggctatggataaaggtaccggaaatgagagttagaaaatatcaaggaatgggaacttctgttttatttggttccggtgaagattcttggaattgtgcatgcacatatatatggaataaatttcatgttaataccgtgagaaatatacatttggtcatagaattatatacggatgtaaaattactatttaaaaagttttgaacaagtatcttataatttttatgactcaaatatagttttaaccaatctctatgactttcaaccaatgttattaatttttttttcatatataagttaaaaatttaaacatgtgtgacataaagattaattcgagaccattgacaagggatactctaagaccacataatgatttctccagcaaggagtctagattctttctggcccaaattcccctctagcaatatcttgcagcatctcagccccttcattgatcattgtacaacaattaaataagacagaatatagtgactggttttgattttaactaaagagaaatttttgatgaagatgcaggagaagaaccatattgcactaacggtgttaagcagtgatgcttaaacaagctttgtgcctaatagttgctcccaaataaacattgttcttatttagattagaacccatgtaataagcccaatggagacgtccttggactcatcccacatccaactcctgcaaatttcatctattgttgttataggaaaaagattagtgttttccaatctttacttaacacctatatagaaagagagaagagaaaatgatgtatatatgcgatatgatacaaagaaagacataagtattaattaaaatgtatactatgtgaagatgttcacttatcatcactcttaattttcaatatatctaatactatataataagagaacgaccttcttagccacaagtttcagtaaatattttccaactggatagactgggggttttgtgtaaggaatccagtaaacaaattgtcatcagattattaacaacaggagggctcaatagaggagaaagcattcacacattgatttttttttttttcgtctagattttcccgtgcaagaaattgaattttgatatgaaaagttaatttaaatataattacttaatatatttactataaaagaatactttgactctatatctaagaactttatataaaaattatattgacaagctctaagcatatcccccatttcaggttcttaaccatattgatcttggaaaatggaactactaaattaattaattaaacttgattaatctactttgttcatgcatatatcttgattcaggttcatagtatttttcttattcatgtatcttgcatttaataccatctagtttttaggagttgtgttgtttgaatgtatgtatgctgtaccaagaggtgccttgtacaatttagaaatactcacgtactagtgaatttgcatataagccaagaaaagaaaagaaaatccaggaaatcggatgaagtgagtttgtaagaaaagtttgtgtgttctccctttcccttctctacttatgttcttgttgtttccttcaattgaaattgagctttgacatagtagcagtcaagaaatacaaatcattaacagaaattataatattgtgtatatttcactgcaaatgaatcttttttttttttcctggccttttgtcattaacagatatattataagtataccatatacagttatttaattctgaatttttgtacattttttttcctagtaaattatgctcatggagttattttaattggtttgaaagttatgcacgatgttgttctttatgcttagtttagaaaagaactgttataactgtcaagctttttgatcctttgccaatatattttggtgaatactggctattgttcctagtggggtctccctaatacattctacacctcagttattgctggagcactattttcttgaatttatttgactatgttttgctctcctggctgcataagctttctttcaagaattttttatttttttaatcttgaagtagaacctctattttcttgaatttttttatcctctatcaaggctttttaactggaaaagactagtaactttaaatattgggcatatatagattttgggatttattcgagacatggagtaaccatattacacaacaatcaacaagatcaaatatgcacagttttggtggttattggtacaacatcttcaataatgcagaaatcagatttacttggctaggcatgaaatgctgatataaaaatacgaacctgtttaaatataggttaaaagtgtttttgagaatttctctattgaaaatataatatttttttaataaaaaaaactctcaaaaatatttctaatcttgaattcaaacaaactctaagaataacaattatttatcactttccaataataagaagagtatataatttttgcatgccataaaactcataatgtgtttggcaacatttttcacttagttcagagtttattttactagataaaaagtttctttaggcaaaaagcatgtatttggtaaaataacttattttaatagtttctgatgaattttttcctcaaatgctacctaaagtcacttttatattatgttttttaattattaaatataattcattttaaaaactaaaaataaactaaacacaaataattacaactaaaagttaaaatctcaagtaaattaaaatatgagaaatagaagtgcaatcaaacttttatataaaccagccttgtaggaaccagacaagtgtgtctcgactgccatgtttggtctaaaagaaatattaattttttaggtcctttactttacaatgtcaacaatacagttatctttagaatacacaagtttaattataaaaaatattttcgaagagctcagatatcaatcatacgcgaaagataccccttttttgtaaacagtttaattatgtgccatatgatacaaaaacaacttaaacaaagaataaagactcgcacgggacaagatatatatgatataaaatagatattgccagacataataaatagtgaaatatttgactacatttaatatagaaaaaagagttatacattgaaaatttagtaaaaaaattgaataatcattcaatgacaaatttattaatttttaaaataattatcttaaaataatttaacaataatttataattaaatattaataaaactattttaaaatacataaacattaaactctttaatatacctatacatatttaatagtacaacaaattacactaacatctaatttttttaagagtctaatgataatgaacttgtagtataaaataatatatagtcattttaacacaaattatttaataatttatgattatatcatagtgtaattaaatattttttattttagaaaataacagtgtcaatataatgtatttcaaataattaacataaactattgtaataatggttaaaaaatataaatgttttatgcggtttcaagaaattataagatgtcgctgtaattttctctttggtgttaatatctatttagagacgataacattcgcaatccataattctctagcactacaatattttcctttttactgttttggaaataaatctcgtgatctttcaccttttttccctatactataggtatcttctacaaaattaataggaaatcattcttattaaacaagttttttttttcacatgtaaaactcaaatttcgggaccttaaaaattaagcatatactacttaaatcaaccactcgttagtatgtataaattttcattttatctacattgataatagatattaattacaaaaacattcattctctcgtgtatgttaaaatcaccgctaatcaaataataaaatgttataaatatagattatagagtagtttatatactctttaatatgtatatattggaggtggctaagcccaaggagcatgaatgtgttgaagctatgataatggtgatgtcatgggttacatgggaataggaatgacgagggatgggaattgggtggtaatgtatattttgaaacaatttgactcaatgaaaccaaaggtggacttttccttttacaaaactggcaggttctaagactttcaacatataattaaataattcgcctttataaaatcaaatcatttcttagagtgaaataaatttattatattgtttttattcttaatgcatgtaattttattattgaaattattttatgctttccaaaaaaaaaagttaatcagtttaatttatgtatttccccccttttttatacgtcaaaagaatatatttttaactttatttaatattaacttgttaagatattatttttatttcttactctctaatacctatattctcaaattaattacttttgtgtgtactatattcttctaagaataatttactaatttagtctctttgtaaaattccctacaaaaaattgacacgtaattttgtgtttctaaatttaatttttgaaatttattcatacttacttttttttataatctttcatattttattacgtgtttcaaagattaatctacatgaattgcatttatacgtttttcataatgttaaatatttctcttaaataacttttagtttatattttgaaaattgaattaaatttagacatgttcttataatacacaaaatattttatagttataattgttgtcaaggaaaatactaatataacagttaatacgtatatcatacattacgtacattggagtttttaaacttccgtaattttttttttgaaatgatcaaaacgaagattaattaaaaaaacttaaaactatagttgtaatatgcatacctaatttataattattcatagaagaatactttaagaatttaattatatatatatatatatattattaaaacgaaataatagttactagataaatctattattatattatatattataatacataacttaattagaggtaggacttttactcactctcactttcttaattaattttttttaccaattaattaatttttttaatattaactttctttgtcttttagacgtgcatttacagcattgctcaaataataataaaaatttcttccaactatctcaaattactttttttagcctttcgtatgtatttcatctttttaggtgtaatttttttttcttatcttggtgtctaaattaaatttaaataattaattcaattatcaacatttaaaaaactgtgataatttaagttatttattatatgtttaagaatatttatttgttaaacttagaaaatataaattttgttaatatatggtgcatagaaagatattattagttattagtagggacaaacaaaaactgtatctttgacaatccatcaatgataaacgtttctttcaccttatataatgatggtgcatgcattttttctctttaaaaaaattgatattgtaattggaatctggtctcttggatctccataaccttcaacgtttcttcccttagattaggggcacatatcacatatcattccttccaaatcttctcctgaaaacaaaaccatgatgagaaggcattcccttgtgactgcatcaccaaaacaagggtccctcttctttgttggcgacgacgacaacaacatcaacccaagaattcatcctcacactcacacccttctgactccatcatcaaaacaagtcacagaaaaccataatcactccaaaaccttcaaaaccagtttcaatcacaacagggtaaacaccttgcacactggttccaccgtacaacatgttgaagcggatgaggccgttgaactggatgtgttgtggacgaagatgcaggaagaagccaaactcgatgtcactgtggaacccattttgtcttattactacaacacttccattctctctcaaaactcactgcaaaccgcgttggccaatcaccttgccatcaaactcagcaactcaagcctcccaagcagcacactttatgatctttttgtgacggttttggagaccgataaatccatcatggatgctgtgaagagtgatctgagagcggtgaaggagagagaccctgcttgcataagccacgtgcactgcttcttgaacttcaaaggctttctggcgtgccaggctcacagggtggctcacaagctatggtttcagggaaggaagattcttgctatgatgattcagaaccgggtttcccaggttttcgcagtggatgttcatccgggggctaggattagaagtgggattttgttggatcatgcgactgggattgtggtgggagagactgctgtgatagggaacaatgtttcaattctgcatagtgtcactttgggagggactggtaaggtttctggggacaggcacccaaagattggtgataggtgctgattggtgctggaacttgtatcttggggaatattaaggttggtgatggggctaagattggtgctggttctgcggttattaaggatgttcctccaaggactactgttgtcgggaacccggctaagctggtaggagggaagaacaaccctgttaagttggataagattcatagcttcaccatggaccatacttcccatattgctgacttttatgattattgtgtttagactttagagtgtagcgtaatgtaataatcctcaagcatgtatgatttggagttttgtgtttaggattttaggtgaagtgattttgatttttgattggggctgttcttttttactatttgagtgtgtacaatagcagcaatgagatttgaacctaggacttcatgtagactactcaaatctcttaaccactaggccaactctggtggctactggtgctgttcttgtttgagtaatagagaattcatgttctcctgctaacaataataaaagcgaaaataatagtaacagcctaacaggaccccttgattacatgatgttattgttgggtatgtacagaagctgtatttgtgtatgtatgcatgattgtgttgttgtaagttgctgtatatgaatttcggttttcattgctttcattatctattcttcttcttgttatgttgcttttccttgttggagattaatgtgtgagtggtagtctcactgggctgtagtttaataaaattaatgtagattgtaggccatgaagatatatattggatggtatgcaccttaataagggtagtgctgataggcttttcagtcgtgcatccagtgctgttctcagtttgagcactcgatcgtttggaatttataattttatgattgttcaaatttccattttttttaatataaaagtccaagactgggtgttataagaataagaaaagccagttctttcaatcatcaacatcaaaccatctttgcaagagcttaggcaacatcaaattcttatccctgctaagttgtttttatttctagttatcgtggtctgaggtattttttcagaggtagaacaaaggaattactctttcagacctgtacttttatgtgttggtttatcatagtttttgtaatctaacatgtcctcttaagcaagagcagaagctcttcaaattaaaagcatagactaataaacaatgcacaagcttatttcatgttgttctaattttaaagatgaagttcttgtggggaagttattaaattgctaagcatctaaaatttgaaggaagatatatgaacaacactgaaacggatataaaattaacacaaatttttcaatttttttgaagtaacacaattttgacttagtcccttcctggggcaattttggctttcactatgtttggtaaaaggatttgatggtgtatgcaagtgcatggtatttggacaagtaacagatggacatggttggggtacagactcgccgcattggaagtccaaagtttctaactgctagtctttaggggaatgtactgcataaaaagcttgtcatcctatgaaagccaatttcatgacggaacatgataaacaagcaacaaaatggctaatagaaattctgaatgttgcaggccaaatacaaatggttaagataatatgaatattcttgtattaacttaatcacagctacgaacactggtatgaacaattggtacacaatgctacaagatccttcatgtttatgttattaaccaaatgtgcactgttttcagaaaatatgattttatacctactatggtatttcttcaaaaagtatatttatttaggaaaaaataaaaggaaaatggatggttttataggttgtttgattgtatacttaagtggaaggaaagaaaacaaatgtatataaaatgacgcgaataatataaataaataaataaataaaaatgtataagaaatgaggatttttttttaaaatatttttttttctttaacccatatatatttcatgggtagaataggtctacttaggctaacaagcttataattctttttttacaagtcttatcataaaatatacttttaaacatgaagattagactagatcttaaaaaatgcggctaataaataaatatgttagattcagactttgtttatgtaataaaagtcacttttagacctatcaaaacatatttggtgtaatctattttcatctctattacaaactttttataaaacaaatacatcttatatcacttataaaagtttttttttttgctaacatattacttataaaagttttaaaaaatattagataatgttaaatatctattaaatataagggatataaatataatatttttcttttgtttttgattttatgagttttcattttaatagattgatatagagatttgcaatagttttaaacagtcttaattgtgatgcaatttaatttagttttacataaaaaatcatttgaactaaacatacaactcattcaatttgatttgaatgtaatatccaatttgaaccaagtaaaactattttttaaaacttgtttatgtttttttttccttattttcttaaatttattttatgtttgactttaaaatatttctaattagacaaatagcaacacaatttgatacggcgtaaaatatataattttattattaagtaatgatcaactattaaaaataacgtttaatttttatcaattatttgtaaaaaaatatatttactaatatgaatctaatgaagaaaaaaaaatcagagacctagttaaaaatttagtaaaaaaagatgagacctgcgggtcaatttaactattttttatgtgatcagttttctatttatttatttatgaatttagcactttaaaataattatttgttgagacttgagatattttcttgcaaaatatacaaggagtgatttgcaatttgtataaacttgtcatgtgacccattgtgcaagtaattgagggggattcataatcatttgtatcgaagaaagaagcgacccaaattcgaagaactttgcttccttcaaacttcaaagtgagatacggggctcaagatcaagaacttcaacctcaacctcccttctctgtcactgtgactttcgtttcgtatcgttttattattatttttaattatcctactttctctttctctcttctcattatgtattcaaaaccctagctaggtttttggagctccctttctttccgatcccaccgtcaaacttctctttctatatgttttgcagggtccattgaatatgtctccgtcgttggatcttcctcccaagggtggcttcagttttgatctatgccgaagaaacgcaatgcttcaaaacaagggcctcaaagccccaacctttctcaaaactggcaccactattgtcggtttagttttccaggtctgaaatcattccctcgctcttttcatgtctagttaacctaattttttcttattattatatatttaaacatcgctgggtttttatttgtttttctacgtgtttatcttcactcttttttatctgcttctttattttgatttttttataccgtaattgtgagtgggttccaatggaataatggatccagacacatgatgtgaagttatggttctgcttggaatctcgaatgaattagataatttgttttggtagatagatgtctggccttgtgaggtttcgctgtgcgggtgaaggaaattcaccttatgtaaatgctataagttttgggtgttatatttgcgtaggttgcgaatgttgaatttttatttatttatttttatgttagggaaatagttggttctgaaattgtgcattgttttatagcaagagaatatgggaagcctagtctggctctggatatcttgacttgtatgttttgaaaatctacgtgactgtttttgaactcaatttctatctgtaaagtagtaatattagtctattactactctctcttttctctgagaaatttgattgattttttattctaaaaatattttaagtaaaatgttaatttttgttctaaagtatatgaatgattttactttagaaacaattggcaagaaataaagtcataaagctcctgcattgatttataaattttgtaatatataagtggctacttcagtaactgctaatcatattgacctcaacggtggatattgagcatggttaagcttttttcttgtctacattgttccatctagctggggaacaatcaacgtggttgtgattctaatgttacagctgaggtttaatatgaagattttgtatcataaatttgaaaccaagttgctccgtctacagagtacagactgatttcttgtgaaacagtccactaactgggaattgtaacatttgtatttgtgctgttaatgagacttttcatggcaatattatctattccaaacaaagttttatgacttcatatgttgattgcatatttatttttaatgtttaatttgtatattgtaatctaaagctgaactttcccacttaataaatctgcctcaggatggtgtcattcttggtgctgatactagggcaactgaaggacctatagtggctgataaaaactgtgagaaaattcattatatggcacccaacatatattgctgtggagcaggcacagctgctgatacagaggctgtaacaggtatttgtttaaaatgcatttttcttgttagttgttacacatttttacgttatgccttatggatagttgcatatggaccacaactttagcttttgctcttgttattattgatgtagtaaaattgttgaaaatgagaagtttgttatttactgtagacatggttagctcacagctgcaattacatcgctaccatactggtcgagaatcaagagttgttacagcactgacccttcttaagaaacaccttttcaagttgagtttcagaattttctcatcaatttaattttctctctgtatcaaccactgaatctgactcttttaaactattgtgcagttatcaagggcatgtctcagctgctttggtgcttggtggggttgatatcactggacctcatttgcatactgttagttcattgcttaaaacttttcttttatgctcaagtttccttgttttggatgcctatagctcaatttctcatgacttgttttgcagatttatcctcatgggtcaactgacaccctcccatttgctacaatgggatcaggttcacttgctgcaatgtctgtatttgagtccaagtacaaggaaagtttgagtgtaagtaagaatttaaggctcacagcctcatacgttagtaaagctctacgttagagtatttttgaggaaattcacccttagaggagtgcatttgatacattgttgtgaaatggaggtgccatggcgcgatgggttttgctaactgcctactatttgtgaagggaggcctgccatggctgtgccatagaccacaatggcatgcttatatggcagaattcttgccttccaccattgataacactgatttgataatattctgtcaaagctgttcaatttataataatttcaatggaacaatatgaagcaaatatgtcaatttcaaatctaaatgtaaaaattgtgcattatatttgttataattgatactggtggtgtttgtaactttttatcatgttgaaatgctgcattttgatagagattttaatttgatataaacattatgatgtggtgtagagggatgaaggcattaagatagttgttgaggcgatatgcgctggaatatttaatgacctaggaagtggaagtaatgttgatgtttgtgtgataaccaaggtgagtgctttgatgatcaattgtacaggttgttctttgatgagagtcatctaactctaatttctgcacaatttcttcattaatgcttcacagggacacaaggaatatctcaggaaccaccttctaccaaatcctcgtacctatgtcaatccaaaaggctttgatttccccaaaaagacaggttagttgcgatttttgctaatttaatatacttgagactgcaataaaactatattgttttgcttagtattgtgtgtcaaccgtcaatagtttgtagtctagcatgacattgtatctcaccttgtgacaaatatgataatcttgggaatttggtgttgtgaagtatcaaacttagataatagctcaagttagacaagcccctttcaacttgttgctatatgattaaataattgacgtttgacagagttgtcaatttgacgttcatgtttttctgattaaagaatatgttagatgagtacttattaactaagggttgagatgagtgctctattaaatgagggttgtgtgttactgtgtggatgagttttgggtcttaaagacccaatccatgaaacacaaatatgattatctctttccttttgaagttcctataacaaatctactccacttattattgttgttgtttaacacaatgttacacaaatacacaaggctacatatagtagaggctgtatgcacattaccatgcatgatgcatgtcatatacacaattccgttaactatttaaattaatagttattaaggggattacttatgctgtcttacaatttaggggtttgattgcttcaattggaagcacaaggaggcaaattgcacataatcctaagttgaggagtctttgtataatttttcctagataatatacatccatgacatttttatataaagcagaattcctattgagggcttgagaaaataattaaacctttaatggcctgccctttctgtgtctgcccatatctcctgtttcctttttttttttttttaattctagctgattaaacagtatggagaaaattcctttatagaaattattttacatactgtactaatatacattctccattgcagaggtcctcttaacaaagattaccccgttgaaggagaaggtggaagtaattgagggagatgttatggaagagtaacaatcgttccaaaaaatatttggtgtttgagtatgaaacttgattagtgcaatggctgtgatatttagttattgtagtttcacaactttggctttcattaccaaaaaatatttgaagttaattagattgttgcaagttattcctcaaatttcttcatctggttggattttgactagaaaatgcttaacaaaacatcaaatatatacaatttgattgatgaaagatgttacttgttttgttttgacttttcaagctttatataaatataaattggtctataatgagattaactttgttagtaaattgacaatttcgacaggcgtacttgctagcaagttgacaactttaggaatcaatctgtgtaagggaggggttttatgtacagttgaaatactatgccacaatctgtgttgacagttagttttgagtcttttgacaatagagtggttttatatttgtgaaaaaaattattgtttgagcgagattaaatttgtgaaaaaaatggagattaaattcatcaaattaacatagtggaaagaacaaaagtataataaagttattgtttgagcgagatttagagtgtaaaaaccattatctttgttttttttttttttttataaaaaaagagtgtaaataccatcagaactttttttaatgcaatactattagaacttctgttattgttttagtagatcatttctttcaattaataacattttaatgttaatttataaatattttgaaaactaacattatttacaaaaatagagtattgtataaataatggtatttcaattgaatgtttaattaaagtaaaacttaattttaaaaatttggtcattcaacatttatttatttatgatgaattctaaaataatttgccatttgatatatgcatgagtattatataagaaattttaaatattgctaacaaataaattaaatctttggttaattgtaacttttctaatttaactcaactaaagttttgaaccctaactttattattttttctattaaatacatttatatgatgatgttatgttttgtaattaacattatcaatttatctatcaatgtttcagtacattatatttgacattatcgaatcttactacatatgatttttacaaatgaatatttacattacacacttttaaaatgtataaccaacctaattaaaaactctaattttattttttgtgttccttaactacatctatttgatgttcatatgttttgtaattaacattataaacttatgttacaaggtttgcatgttatatttcatatttatgaattttattatattttcttttttcacctccaattttacataacatgataatgtgcatttaaatgtataactaatctatgtatatgcgcacgggtcaaatactagtttaaactcaaataaaaaaatgaattttttaatatttactacatttttataacttattttgtgcattataattataataaaagtatttttataattataattaaattttttatatcattatcatgagctccctatatagagccccaacaacaagacacgtgccaacatcattaggctgacaaaaccaacatccaataaggctcgacactcttgagaagcataagctgatgaagtaatcattttgtccaccaccagtttgctatcaaattcaaagaatagatctatgagacccatctaaatagcaagagcttcaacttcttcaacgtcacttctattggaatcacagatggacaccacttctgatcaaattatatgggtttttttccattaatttatttatcaaggactatcaatcattgattgaatcgatgaagctcctatttgttttagtatttacaaattattttttcatacttttttaattaaaaacatgttttatgataagtttatagttaagatcaatttaaataggtacatgcatcttaattatacttaacagttcaaaattaatttaattaaaatcattttctttctaacttttttataaaaaaactaacccagaatttaatgtttacaaaaaattattcaaccaagcaattaagttcaataatactaattcaagaagtaagtaaataaatctttttctaatgattatattttaaactattatattacaaattatcatttatcttaaatatatatacacagtatcataagaattaagattataatctctgttcatttcgaagaactaatctaatgactatatagataaacctcagcatcgaaaattaaacgtatggccaagagtcgtgcttgcagccatttttgaaatattaattgtcgacgacttttctaaccattatctttgttaatttctaattaaaaatcagtccattttctcataagctaagaaagcagcagcagccgcaccagtaccagctatatttcctcgtttcagcaccaagctgtgaatttgtggtttaaacctcaacattacttcacagccaaaccatactttttcaaggttataatcttgatttataagaatggggttggagcttcatatttccttatctataatccttcctttcttcctcttagtgttcatgctaatcaacacactttggagatcaaagaccaagaattcaaactccaagttgccaccaggaccaaggaagctacccctcataggaagcatacatcatcttggaactctacctcataggtccttagcaagattggcaagtcaatatggttctctcatgcatatgcagcttggtgagctttgctgcatagtggtatcttcgcccgaaatggcaaaagaagtgatgaacacacatgatatcatctttgcgaataggccttatgtgcttactgctgatgttatcacttatggctctaagggcatgaccttcagcccacaaggaacttatttgaagcagatgagaaagatttgcaccatggaactactagcacaaaagcgtgtccagtccttcagatcaatcagggaacaagagttgtcaatttttgtcaaagagatatctttgagtgaagggtcaccaattaatatcagtgagaagattagttcattggcatatgggttactatcacggattgcttttggtaaaaagtccaaagaccaacaggcttatatagagcatatgaaggatgtcattgagacagttacagggttttctcttgctgatttgtatccttccattggacttctacaagttcttactgggattaggactagaattgagaagatccatcgaggaatggataggatacttgagaacattgttagggatcacagagaaaaaactttggacacaaaggctgttggtgaagaaaaaggggaagatctagtggatgttcttttaaggcttcagaagaatggtgaactccaacaccccctgtctgacactgttgtcaaagcaaccattttggtcagtatgtttcttaaaaatctatgcaaaaggcaaagataattatatccaatcaaatagttctaggtatgatttttttcttctctcaattgatgatttgatgcagtcaaaataggattgattatattgatcttgaacatcttttacaagagaaatgttaatgacaaattctctaatacaatattttgaacacactttttatttactgaaatttattaaaattacatatttgtaggtcatacttcttatttattagccttatttatgattttacaatttttaataaattttaactagtaatagaaagtatgtcaaaaaggctgcatgttgctaaacaggccagagaggatccgaacttgataggagtgcgttagaaagagtgtatcaaagcaatcttattgtttaatattttacatataaaaaaccgtccaaaatttccaaatctgagtcatttagtagactacctcatcagtcatcaagagctgtcctgggtgcacttcatattttaatttatatggagttatgtaatgaatattgatctaatgttttgaactgagccggttttaagttattcacacttaaactatgacttacattaaattaaactgataaatttctttctatgataaattctggttattattgattaatctcattagaaacgtaatactaacaccttaacatttctgtcaggacattttcagtgctggaagcgactcttcatcaacaataattgtttgggtaatgtcagaactagtgaagaacccgagggtgatggagaaagtgcaaattgaggtaagaagggtctttgatggaaaaggatatgtggatgaaacaagtattcatgaactgaaatacttgagatcagttatcaaagaaactttgcgtttacatccaccttctccattgctgcttccaagggaatgcagtgagagatgtgagattaatgggtatgagataccaaccaaaagcaaaatcattgttaatgcatgggcaattgggagggatcctaactattgggttgatgctgagaaatttattcctgaaaggttccttgatagcccatttgattacaaaggtggtgattttgagtttatcccatttggagctggaagaaggatatgccctggcatcaatcttggcatggttaatgttgaattctcacttgcaaatttgcttttccattttgactggaaaatggctcaagggaataggcctgaggaacttgatatgactgaatcctttggcttgacagtaaaaagaaaacaggatttgcagttgattcctatcacttaccacacagctacaagttaaggccataactattgtgttattaaaatgaggttgctctcaaacattataatagcatggatttctttttttttttttttttttcttgtgtgtgaatggagcatggatttcatttgattgttgactacatcaatttgttagccaaactaactagtctcaatctatatcaccatatagattacaatttgtttgtcaaactaagtcaatagtcaagaactctatgctagtcaaatatttgaaatttgtgttgtgtacttattattagggtgttgtgtacttatcattaagcattacccataataacacctatttgaaattttttatatctaaattgttgcagattttaatatgaaatatttttttatatgattttctaggtagattttatttttatatctgataaagtatctttaaatgcatgattataaaactaattcttttaaggatgatggtcaaataaagttattttcaaaacaacaattcttgaattcttaatattgaaaggaaagtttatataaagtcataattcattatggtggttattaaaaaaatcattttcattaaaattatagataccattaagaaaataatttgaagaaataattaatataaaattttgaaatttctatattttgagaatatttttaaattcaaagacatgtatttttcttcatttcaaagaatcactcttaggtaaataatataataatattaatgatattatattttattcaaaatatgtatttaaagattgactttgatttgaagcacatgtattttttaccattggaaaaagtttgtatctccattatgaaataaaataatttatagataaaaaataaaatttgttatatataatttatttgactaattgaattagtaatattttaaaatgatcctattctaactaatataatattctggtaatattcaatttttatgatattatagaataaacatattatttatttttgtatttgtatatagtatttcttttaaaaactatccaaatttcaattttggtactttgcgacaagacaaaacaaaaagtatatgaagtcaaaagaaatactctatttaatagatagattgtgaaaaactctgtgtatatattttcatataaatatgcaccatgttacaaagttaccaaatattttagtcaataattaatatttgtacttgattttatttaattttgactaaaaattttaaattttctatgtactatatatttcctatagatcttatagttttaaataaattaaaaaaataatcttaaaaattacttaatagagattggttgacttaaatttaaaatcttattatctaaatttggaattaagataattttatactatatcattcgtatctttagaacatataatttgaccattgtgtaaaataatttactttaaaaattagtttagtttgatatcatgctaacttttgctatattttaaacataaaagacaaaaaaatccccagcagatgagacataagtattcgttgttggttttttaaattagcaaacaaatatcattaacttggtaccagtggtacccaaataaaaaacatattacaaaaagagaatatccaacttgaagcaatgaggttaagctgtattaatatcaactaacataggaatatttattaacctcaagctaacagcctgaacatctcaaggaatctgcatatttctatatcagaaaattatacccaccccagataacatatcccttctcctgttacaaaaaactctgcaccttagccttacccattgcaacccaaaacacaacaccacaatgttgatctcgagtgtataaccctcggcccaactcaccaaagcattccgattaggcacaaagaaggcaagtgggagtgttgctactccactggacaaaacaacaagtaaagcctggtgtcaatgatctcaaccatgaccaaacacagaagttaacatcctgtaccatatcagaactttgagcagaatctatattaaaaacaaggttattccttttcttccagacacaaaaaattactgcactccatataaccatccatatattgcattcagctgaagaccttccaatgcccgagtggagccaaaaatgatcttgaagtgatttcggtaaagctagagcaaaacctggcgaaatccaactgtgacattctaaccagattttaaacacagcttcacagtttaagagtatatgctgcatggtttccacttgttgattacagagtggacacatcaactcagcttcatctgtgataattcccctcttccacgagttatctttagttgggaagcctatctctcaatgctctccagattaaaaatgcaactttccttggtatatttatccgccatacctctgctaaggtgatatgcagggcctctgagccaccatctagtgttcattgtgaatatgcagaatttgtagattaagtgcccaaagggcttgctctccaaatccaagaatcaacaatgttgttatgcgcctgcacagtttccaaaagagttgttagttgtaaaaacatctccctctcccactcaaaaggctctcttcaccaaaaactcccaagaccatatgccattcctccaaactcccatattcccgatcagctccaacttttgttccgagattaagaataaccttggaaactagtttgccaacaatttccatccacccaagtatcaacccaaaatctcactatatccccgattcctattttccactggatcccattatcaaaccatttttcttgattaagccccctacacaccctctttaagtccctccaccacaagctttccaacgaagagctatcctcactcaagagaccacaccacccatcatattttgacttaagtacatcaccccatatccctttttgattgtgaaagagattctacctccacttctccaaaagaatctcattgaacaactcaatctttttgacaccaagacctcccttcttctttgacaaatatcattccatttcacccaagctaatttattaatatcattactccctccccacaaaaaccgtctttgtattccaacaagtttagcgcacactaccgtaggaattttgaaaaaggagaggaaaaatagttatatggatgataggatggaatttatcaaacaaaccctctcccaagagaaatatgtttatgcttccacaacgttaaactcttcttaaatttgtgattaaccagttgccacgactcctatattggaaaagaagatatttgagaaaatgaaaattttaaaaagatttggaggaagaaaatattttattattatacaactcgttttatctattggcttgatagaaaatagtggaaaactttcatagttatactaataatacctccttaattaataagtaggattctgctaacacaattctcatctaatgactataaatcattatctagaattctccacactattttagcttaaatatttatgattgtgatttctagatacaattattctttagatatttttatgaaaatatctagagtaaattattctaaattttagactaaacatctcttgaatatttttagatattaaacaatttaacaactaagttcaatatacctaaaccaaatttattattattcaacatcctctaacctaagattagtcccgatcagtaatccttgataaacaatcagtaaagaaaggattctataatttaacatacttacacaccactccttcacctcatccgccaaaccaatggatatttggagacataagtgttagtactaatggatatttgaagtttcaagaacatctatcatcactcaatatgtgataaatcctagtagtatatagggctaaaatctcgtgtattttttttttctattcacatgaatttcacttaaaaaggtataaactcctttgaaaatgaaagacaaaaacggaacttaccgaaatgcagaaaagaagagtataaaaatattagtcaaattaaaagcaatgtgaattaatgcatgatcatatatttatttatttgtttttgaccaaatgcatgagtatattagtcattccaattgggtgtgaacacacactgtgtttactcactaggaatgcgtccttttagcttaccgaaactgaaaaggtgtattggtcttatttgacatacagacacaaaactttactcattcaaatcctttttattttcataggcttcaaaactggctttggtttttgttcagtaaggccttccctattcctgtgctactcacttcatcttcttactctccctaccttgaaaaaacgtgttttttttttttttatcattgtgacatagaaagcgtagcgtagtacgttcaaatctcacttcttcttacgttccttcattctctgatactgataagaaagtctcattctgccactgattttttctttctatctttttcacaggaactttacttgtagcaagcaattgtaacgcaagcttcttccttgcccattcccccccaaagtttgcgacttttgagattctcatggccttccaactcaaactcgaacctaggtctccgcctatgtccacttccaccacccagaaaaactacaaagagatgagcatttctcagcttgtctcggttttgcgtgtttcgtttcaaacggaggattttgacaaagttgaggaagaattggcgaacagggacgccaaatttaaggcggagattgagccactccgggagaagatcgaggtggagaggctcaagaggattgaagccgaagaaaaacttaaaaatagagatgagcaatgcgaaaaggggaaaagagcacagcaaaactatgagcagttgttgaaggaagtgaagaaaaatggtttggttgaaaaaaacatgattgacgagttaagaaaaatgagcctcgctttacaacgtgaaaattgtgagctgaagggcttaaaggaaaaatggctagatgaacttaggagcaagatcagtgtgttggaggaggagaaggatggggacaagagtgttcttgatgcccttagcacaaagaacagtgaattggaggaatcgataaagaagaatttgacagacatagagaggttaaggaaaaagaatctttctctagaatgtgaagtctgtgagctgaaggaattaaagaaaaaatggctagatgatgtggctgaacttaggagcaagattcatgttttggagggggagaaggttggggagaagagtgctcttgatgcccttagcacaaagaacagtgaattgaaggaagcaatcaagattaaattgaccgccatagaggggttgaggaccgaaaatggtaaattggcagatgagaagtgcagacttgagacattgatggagaatttagagagtaaatttgcggaaatcggtgtcaggattgtgaagttggaagatgctacacagtctttgttagattgcttaaaagctgaaggaattactgtcaaagttgaagaggttggtgactacgagcttgaaaatgacactgggggccatgttcctttccaaaggaatgaagatactcgtcactcaattgatgctcagtctcgtagcaaagggaataaggatgctctaggtgcatcaggtatggaattctgcttgcatcaggtatggttcaaggcccagctaccaagaaatatgaacaaaaaaaatgcatcaagaattagatttgcatttttataatgcattttgttcatatttcttggtagctgagccttgaaccatgatgattatttattggtaatggctgtggtcaagagccatgttttagtaacttaattgagccggtggggccattaattattgctcaaattggatgaattggtgactgaaccagatcacattaaaatacttaaaagctcatcacagtttgcaattataattagacacaatttaagaacatacactcctcacagcatccaatcttgtttttgaagtgaaaatgtcacagttccccataagtttcaagtttgattgaccatgtttacacaatgaatttattaatttggagaatagcctaaggtgtctacttgcaaatgcaaggtaaggctgcccacaattgatccacactgtaggtcagacacttccttggacccccacacagggagctttatagcaccaaattacccgttttcagcctaaagtgtctacttgtgaaaagaagcctaaggtcaattttcctttgttatctcaagtaaaacacagtattgttcctgttgtcttcctttgatgttagacacatggtttgatttggagagtcctattatatttttgttcccttagaaaactgcaagccatctcttgtgatttttttcttttttcccctgataaaattttctttcgatgagaacaaaagaaagaacaaataaaagcaggcaagataacttgtttctcccatacaaacaagattacatgatacccttctatacatattatatgaatttgataaaagtatacattgttaatcacttgaagagcttgaggctggattttcatcaaatgctgaggcaacaaccagtttctatttgtattacagaatctactaatctttattctcctagcttttgcttgaattatcatgttaacaaaaataaattttatgtaagttttaacatatctcttttgtgcctgcagggttcaaattggaatgggaaaataagatcataaacctagatgatgatgatgatgatgatgatgatgatggtgatgggtgtacatcaaaaggattgcatggaaagaaagccatttctcaaattattgcagaaaatgaacatccaagttcatcgtatgcaatccagcacaaaagcatttttacagaagcacaaaggattgaagaaatcaaaacaaaatatttatctgatatgcagaattctacttccacatcttctgatgatgatgattcatttgagtttgacgaaggtaatcctcccaagagaagaaaaactgcgccagacagttctggagtaaactctttgccaaggtaaatggagcaatgagctatgttaaatatccttagccatatacccttttgtgtggttatattgaaaacaactaactcagtcttttgtttgtccagttacttcctcactcgcaaaatctagagcaggaggttcccagccaatcttatatgcagaagtttagattagtgcttagttttaaaagtattcacatgttggaatcgtatattgcagatatggtagtcacagtatgtttgtatttattaaatgtactttatttaactgataaattctatgttacctaatatatgtgtttatgtatggatgcataacgagatatgtagagaaactgtgcattccaatatctagtaacgtccatatctttgcttaccttagattcctctcagtgattaaaggtctattgaattttgaaaatcgataaattaagtaccaagataacctaacgttttgaagcaggagattgataccaattttaagtagccaacgttaacttgagcggaattgattgaatacttttgtatagttgaagttgaatgtaagaagataataaggacaaaaggagaaaaagtaataaagtattttaaattaaagaaatacgaacatgggtgatgggggaggggtgacttaccaaaaaatgagttatgagcattttgaaggaaaccaagttctctttttcttggaacatttacttaatcatagctgcttaactttatgctcctactaaaatagtaataggattgaaagaatgggatctaaaattgaatctattttgtttctttgatgccaaatgcttcatttatttatgtttcctcaatcggagtagttccattgggaacttaccagctataatagtaaaacaactgtatttaggggaagttcaatattagatttaccaaataacatgagatactaataaatttgtgacaaatagtaatctgtgtctttatagtatgggttaagaaattaaaaaaaaaaaaattatgggatacataaaattatactgtttatgactgacttttttacattttcatatgattttcacaataaatatttgttcattttagttctattattaatgctctaaaagtattacttagtaagattctaaatttattaaagaataattagaaacgtgaataaccaatgaaatagttaataactggtggacacatcaatcaggtcctctgatattggtagtactttggtttgttgatcttgattggtagtactttggtaattcgtagtttttaaataatatttgttctcccgtgagcatttatgaattatgagaacaagaagaaataaaggcgggaatagtttcatgcaatattccgtgtaaatttaacaagaaaaaaatttaaaattataaaaaaaatacatactgtatataattaatttaaataattaactaaaaatattaaccactaagcaagtagtgtaaattcaagaagaaaattaaaaacactttttaaagaaaattaaaagaaaaaaattaaagtacaagtaaatgagatttaagataaaaataataatataaaagaaaaatttaaaattaattgaaactaaaattatcgtggagtatgcatgagataaggaaaatgaataaagtcctcgggctaaaattaattctgcattcatctaccaaagttcaaagatgcaaagtatctatgactctttctattactaggtttctgccatgtatcatgcatgcagtttcttgcaatctatttcaaacatcacatgagagaacaatgcctgcgcagctgttataatggcccatctcaaacaaattaagtacctcagcaacatctggttgcggatgctaaaacatcaccggtcggcctctccaatctcgaaagataaattataccaaatcctgtaccttaatttggtctttttcactggggcatcaatgttgcatttaactacatcttggggtggaaacttctaaagattattggtcaaaatcatgcatgcgccactttaaagactgaaacagtatatatctgcttttgcaataattaacgtgctccactgtccaaaatctactctcaatcaaatagccaatgatttcttcatgttagagttggtgacccgaatttttggtgaaaaatattttgagaaattttcgggggtctgtagtggcagcagccatccctgctgtatggacctttattgtgataaggttttacattagcagttacaaaatatatatgctgctgtaacctaaccgcttgtatgcgttctcttgtaccttttttttttcaacatagtaaattgtttctcatttgctcgtgatttttttttctgaaaggattttctacttaaaatctgtatgttaattcttctttcctttatctctgttgcgcatatatttctacacttcacaatcagatccattcaaccatgtagatagccaatcagagaactgctgaacatcatccattcaacctgctccgctgttgaacaaagtgagggttgacaatgtggtgcctgattttttgtgtggatacattaatatttaatgtagacgattatagaaaattgaaattttaatattcgatcacaattgcacgtcaccttctacttctttaaccacaaaataaaaaaaacatacccaacttcgcaactattctacagctatcaatttttttttaaaaagaaaagcaatggtaatgaagcgaagaagccaatgcagttgttagttgataacaagtatgctataatatggcaaagaacccgatttctcatggtaggagtaaacatattgaaacaaaatttcattttctgagggagcaggtgaataaggggatgattgaaatcgtgtattgtccaatagaattgcaaattgttgatgtgctcactaaagcagtgaaagttgagcgatttgagaagctatgaaaggaattaagagttttacctctttgaattaaaggagggtgttagttagttagttcaaataggttagttttgttagttacatagagttggttagctagttattaactaactttgtgatgtacaatctgtataagatagagtgcttatgtgaaataaacaaaatgaatcaataaacatctacaagctttatcattctgtcttccttcttctacacaaatatttgttttctgagtgtaacccaacaaaatcaaacccaagtcccattatttagggcattgacttccaagtcaactccactagtggttctggcaacaaccttaattgggttttagatggagtagaaaaagatgttttttagacataataattgccagttaattgaggatataaaagctctaaatctcatagatcaataaaatcaaagcagtcattttacctttgtcccatctttgcctacaatgacttccaaggcaatgtaagtgatagcatcagcgtgcgtaatgaatggggtagaaatttgatactccatgaaaactaaatgatgaaattaagttcagaactaattaagtagatatatggtgccaggctgctatacaatatgtgatcttagtttcaaaacttattgatatatatctacctcttatatatgtaagttctataaaatcaaattacataaattctattactaaagtaaacattcaatgggcataaattacaaataggaattgttaacttgtttagccaaatgtcttaccatcacaacgaattattactgacggcaatgacttctcattagcagtgcagaagggttagaacctttttccatttgaatagttcttgacaaatttaatgggatgaattgacgtatatacagaaatgtccaaagtggatcacaatccaagttgctatagaatataaaactgatatatgaagacaaataggaatttttaacttctttagccctattgtcctaccatgcatcacatcgaattattaagatgatgggaagcaaatttggagatacgtattcaagcgaaatgggaaacgaagtcatgcttgtatctatatgtggaagagttttaatgacggcaacaacttctaattagcagtgcagaaggggtagaaattttattccatttgaatagtccttgacaaatttaatgagatgatttggcgtatatacagatatgtcaaaagtggttcacaatcaaagctgttatagaaaataaaactggtatatgaagacaaatatgttggaaaatggaaatgatctaccaaaatcaaagctgttaattgaactatgatacttttcagtaccgtgatttatgatatctttggactcagctcaggacttggtgagtagtatggcccaagatacattggtagtctgtagaggtaggtcattttttttttgctcaacttattgcagcactgagtgtctgagtccaacatcaattttgaaaaatctgcttatcactgacatgaaacctactgtaacattttttttgtaaagatgtccaaattctaggtagatttcattcttatcagtaaggtttagttttatcatcctgggatggggtcagggtgaatttttgtttcccaattaacatacttataagtcgcttgtttggataaacttttctataaacacttgagaaagtaaaatgaattgagttttttccataaattaaaatcaatttattcacctcaccttttggaggaacttttataaaattttgcacaagttaaaattaatatatgcaaaaagctcaattattttaagttatttttcttttctttatagaaaattttagcttaagagaacctaaacttaactagttagtatcaaccttgattatggcatagctgccaacatggacggatctgccccctcttaaattttcaagaatagataatttttttataataataaaataaaataaaaaaatagtttaaacgtttgcacaaaatgagaaattgaaaaggaaagtaaaagaataataaaaaagatgaaaaataagaggggagtgagtgtgggtatgtgtgtttgtaatttttatgaatgcagtggccacactcttgttatttttaagcaccggccacacgctaattttgtcaattttttctcttttgaattgtacatttttcacagttttattataatggtttgttcctttaattttctttaaaaaaaatttctgggacgctgtcctcgaactcccaccactggcgccccccttactttttttttttttttctggatccgccctgactgccaagtggaccaatctttttttgcctctcttggtgtctgatttgttacctccgtaacagtggcacaatttatttgttattaagcctgtttgagaccaaaaaaggtttcgtcatactttcctcccttttgaaggccgaagaagaaattataagtgggtgaagtcaccatggttacttaaaaaaaatcatgcttaaacgttagagaccaattcaatccatactctcgaaaattgaaaaggcacatagaagaaggaatttccccgccaatgatcgatccaggaaacatatttttacatgcattggaaatgatgatgtgaatattatggtttatttgttacttattggagttatcttatttaatactcaattccattaaactactgttactagtaaaacttctcgttagttatagagatcatcccactcaaggtttacaaaatgtgctctatctgaatcaagttctagttggcatgtctaagaatcaagagagagaaaaacaaagatattcaatataaaaaatcaaagaatggaaatactggggtctaccggaatgttgttattgtagggttacaaaatgaattttgtttgtttgcgacattgcgtgaggaatgggctcttgaagtcctgatgctaggaccgcaatcaaagtttaatttagctacataaaccacatctaaatttgttaatttggctataaatattcatctttcattctttatcatgtatattttccttcatagtaaatctgtgtgaacactttggagttgcacacaagttagaatggaatcatacatggggatggggtggttgtttgttgtgtgttggcatttgttgctgtttcatttttcattctcccattccttatgccatccccatgacagttttgccttgcttcacttcaaggcctcctttcccattaatacaacttattattataatgcttatgattgccctgttactaacctgaagacaacaacatgggaaaatggaatagattgctgctcttggcttggagtcacctgccaccccatctccggtcacgtgaccggcctcgacctcagctgcagtgggctttatggtgaaatccatccgaacagtaccctttttcatctttctcatctccaatcactcaacctcgctaacaatgacttctatccatctcccttgtcatctctctttggtggatttgtgagcctcacgcacctaaacttgtctaatacttactttaggggtgaaattccttcccaaatctcacacctttccaaattacaatcacttgatctctcttttccacttaattatcagtttctattaaagtggagtgaaagcacttggaagaggctgctccaaaatgcaacagttttaagggagcttgttttgaatcatacagatttgtcatcaacttcaatgaggccactcaatttgtcttcctctttgatcactctaagtcttagaggaactggattaaagggaaagttggcagatgacattctctgtttgccaaatctgcaacacttgtatctatcaggtaattttgaccttcatggccaacttccgaacttgagttgtagcacaacttctctcagtatcttacagatctcatctaatgaattccaagggccaatccctccttctttctctaaccttatacatcttactttcctggatctctcatttaacaaactcaacggttcaatcccacccttactcttagcccttccacgtctaacttttctgtatctctatggtaatcatctcactggtcaaatcccaaatgtctttcaccagtcaaacagatttgaagtattgaatttgaggaataataatatacagggtaagctgccatcaacactttcaaatcttcaacatctcatttacttggatctttcatttaacagattagagggacctctgcccaacaaaataacagggttttcaaacctaactgagttagtgttcactaacaacttactgaatgggaccattccttcttggtgtttctctttgccatcgttgatgtatttatatctagataataatcagttcacagggcatatacctgcaatctcatcatattccttgcggtctctatttttgtgctacaacaagctacagggcaatattccagaatcaattttcagtcttgtaaaccttacttacttatgtttatcatcaaacaacttcagtggtcctgtcaatttttcactcttctccaactttcaaaatctgaaaagtctttatctttcgcagttaagtcaattatccctcaactttgaatcaagtgccaattatagtttctccagcttactgcaactggacttctcttttatgagcttaacagaatttccaaaattatcaggaaaagtcccaattttgaaaatcctgaatctggccaacaacaaattgaatggaacagtgcctagttggttgcacaaaatggattctttatctgctttgatcctatcccataacatgttgacaacaccaatggaccaattctcaaggaattaccaactcacaatcctagatctaagtttcaacttactcactggcagcatctcttactcaatttgcaacgcaagttcaatggaggctctcgacttgcatcacaacaagttaacaggcattattccacaatgcctcgtgaacttaccacatcttcaagttttgaatcttcaaatgaacaaactttatggcactttgccaagtactttttcaaggaacaacaggctaagtacgctgaatctcaatgataaccaattagaaggtattttgccagaatctttgtccaactgcacactactggaggttttaaatcttggcaacaatcaaatagaggatacatttccccgttggcttcaaaaactaccacatttgaaagtattggttttgcgggccaacaagtttcacggtctcattgccagttttaaggccaaccatggatttcccagtttaattgtttttgatatctcatccaacaacttcagcggcccaataccaaaagcctacatacaaaattttgaagccatgaagaatatcattcaagatgaagtggatagcagttcacagcaatacatgcaaacgcaatttagtcttggaacatacgcttcgtctgtgactgtaacaatgaaaggcatgagtatgccacttacaaaaattccaacaaactttgtaagcattgatttatcaggaaacaaatttgaaggagagattccaaatgttattggagagcttcatgcactcaaagggctcaacctttcccataacagacttagtggtcttattccccaatccatgggaaatttgacaaacttggaatcattggatctctcttcaaatatgctcaatggtaggatacctacagaattaaccaatctgaactttctctccttccttaatctttcccataactatcttgtgggagaaatacctcaaggaaaacagttcaatactttttcaaatgattcctatgagggaaacttggggttatgtggagtcccattgtcaaggaaatgcagtaaggaccctgaacaaaattctcctccaccttcacagaccctttggagagaagagaaatttggatttggttggcaaccagtggccataggatatggatgtggaatggtatttggagtgggcatgggatgctttgtgttgttaataggaaagcctcaatggattgtgagaaaggttggaccttaacttaatcagaaggtgaaaaggaacacgttgtataagactcatggaagaataaatcagctcaagctgctgtcatagttaatgcgttttcttttcctctgtttttattgtcgtgaatttgtaaaactatttctaagatatataaatctagcaagtttgtgctcagtgtacatatattaaaatagttgaatgtgtattcacgattgatgttgtaatttaattataaagtatcgtcttaattatttttaataattatttttaaaattaataaatttatatatataataaattgtgattagatgattatataaaaaaattatattgtaaatgtaggtttaaagtcatctctgttatataaatttaaattttacttaacagtaatttttcatttatttactaattgaatgcttaataaagtatgttaattaattgatcccattttgtttatgcgcaatatttattttgtgtgaatgataccaatctcattaattatttcgttaacatgtttatttttattaacagcaaataatatttcataaatgatcatttatactgacgtttttaacgatgccaacaccattttataaggtaaacactctcaaatctcattggtccatctccctcgttcttcctttgaaatgcatttttaggtcacacatgttcatatttaacttgttctgtttttccatgtttgtatcggaagaacttgctattttgtaggaaaaataacacaaatcaaataaaaatcaaatgttataaaatggaatgctattaagaaaacaaagtttaaatctagaatattatctacacattgaatttatgcttctagaaaatttatatttctatataaaaaatatagaattggttttttcaatctctatatactttactgtttattattattttgttttggttataaaatattaatatgaaatatcaatattataaattactatttacttttttttattaaagagtttaggtgagttgaattatgaggcaaaaaaaattagattcaatttggacatctaaaatgaaattcaagcttgatgaaagtttaatttccaggacttttaatgtcttaacctaaattagaacatgattgaattgagttaaaaagatccaatttaatttataatcaaagtttaaagcacaagtccacatttcatcaaattagttctatcatgttgatacctaacctatttttatcacctttattcattgtttgtattaggagttaaatagagagagaaaataacaaggataaaaataaaaagcaaaataggatataaaagatatattgtttggatgaatattacaagtgaatctaactataaaataacacttaaaaatatttttatgttataaattttatttatttattttaaaaaaaaaagtttcatgcctacatatgaaccaattttatctctagggatggaaacaattttctcgtaggatccaaaaaaagttctttacttcccttttattgaatgatgaagaaacatcttctaaaagaaacaaaaatgacaaacaagcatagaaagttaataagttccattttctccttaattcgttgtatcctatttcgccttaaacaagcaataggttaatgaaaagtgaaggagaaacattaaagactaatttattggtaattttgaaaaatattttatagaaaaatgtataataaatgatttatatattttaagaataaaaatagatatattaaaaaattaaaacataataataataataataataatttgattaggtattcataaagaaaaatttattaaaaatcaaaaaataaaattcactaatttatcatccacctaaaatatatttaagaaaaaaattgaaatagttgaatataaaatataaaattgaaaataaaatacaacccacttgttgcgccgaacctgggatctggcaagtaggatctaccaagtcctaccaatgcacgcgccacctcttccagtttccacgattcccttcaaaaccctaattttactccaattctccgtttcacatttgcaatttttgattcccagacacccaaaatataaattatttggtgcatatacgtttttttttctttttttcttttttgatgttccccttcctgtgttgcataacacaacctattcttttaccactctgtgatacccatttgattactaagcaaaatacaactactctctcagtttaattgagttcatttacagttctttgcatcaaattttgattttgaattggtgggtgtttttcttctgttatgagtgatgatggcactcgaatcttgggttctcagtcaccaagtgttcacctccagttccagattgttttgccctgcgcatgagaataggcgaaagagcttaccaatcaaagttttgggtagaaccactagatacccatttccctttgtgcccaattgtgttgctccatctacttttacaatgcttcaggcttcaagttttggagcagatgccaagttactagatagaactcggttgaggtgtttaggtagtagccgcaattgtttgagcgatagaaatgccgtttccaaagccaatttgaactttatacaggaattgttaaagaggggaatcatcctggctgcaactgtttgtggggtattggtgtttggatgttcacgagtttttgccgttgaaggggttgtgaatgcaggatatggtgtttttggacagagcattcttttgcttaggaatacatggcctaaagtgttgcaagttctttgtatatttaaggagcaaggtttggtgttggcagtgcttttgggcctttcagcttttttctcgatggcagagacttcaatcactacactttggccttggaaggtatctatcttgtttatgttatcctcctttttctgaatgataatttatgttacatgaaagtaggagctatgcctaggcaaaaaaaaactctttttacaccgccattattcagtatagacctattaaataattatatggaagttgaccaaaggattgttgccagccttgattggatggggacattgctgacagtgaaatttgttttgatatccaattgctgaaagtttatcaattttgaagaaatgaagtttggatcttgcatgagatcatactgaccagaaattcatctgccatctacctgagtgcaacaccaagatttcttgtgctaattatgcagaatttatgaatgactaaaagttagggatttcataactgatgtatatgttagtaaggaaattaaatgctgtgatttaaggatcaactactagtctattatatttccttttcttttcaaaaatgttttttgttcttttaacatgcttgcagattttgcacatcagatttgttattcactatgattaatttagctgattaaagtttgaacattgaattctaatatctgttgatgacaatgtgtaaggttcgtgagttggccgaaaaggagtctgaaaatggtgtcttcagactactccgaagtgatgttactcggttccttacaacaatacttattggcacaacgtattctcctggcattgatcttattattgaaaaatgtcctattttttttcagtgtagaatgtttctcatgctagtattttgttgtatgcagggtggtcaatattggggcaactgctctggtcactgaagcagcaactgctatgtttggtgaagctggtgtcagtgcagcaacaggagtgatgactgtatgttttgattttcttgctcaaatgttaaaaaaaatctactgtttctaggacatcaaaacatgcttaaagggcttatgcattgatttgattatctaaaattcagatgcactaggccacttgattattattcatttggaacattgaatctttcagtatatcaacatgctgcccattaaacttgcaaactcctgatgtgttgggaacaagaattttacatgtaaagcttgctagctttatcaccaatttgtgaaaaaggtgccttagctaacttttgagtaagatagaagaaaagaggggggggggggggggggggatccgttatttgaatttgtacatttaaaagctgtccatagacagaagtttagacaacattataggatatacctgtcttattttatgttatatttttcgttgttttgttataggatttacaatagaattataaattatcttttcaatcagatagattgcatcaaattgatcacaaaacagtgcatatggtgtgcaagtttgtatgctttcatgtaagttttttctcatatatctgatttctcttttctctttgtaatcaaacaaggttgccattttgcttctcactgaaatcactccaaaaagtatagctgttcataatgccacagaagtggctcggtttgtggtaagttgtaaatttcttgcctgttcttttataatatttgggaacagaaatgatgctgctgattagtcatttttgtttactttttcacacatcatccatatttacatgatatttctgcctcaacttcttttgtaacaaatattgatattgatattgatcctaatgcctctaggtcaggccagtggcatggctttccctggtgttgtatcctgtaggaagaattgttacttatctttcaatggggatgctgaaattgcttggcctaaaaggaataaggtctgttgaaaagattgccagagattaatcttcttttatcatattatatctatttcttttgcttctttatagatgttttgtgaaatctaattttaatctgatactaactaaatcttagttccttcatcttaaggatggtgctcttttattttcacccatgctccatgataactgttcatttcctaaggttgattttttcctaaatgttatgataaagagaacaaatggggaaatgagattattttattaattatgagggatttatatgtggtagatggttgataacagttcttctgttttttggtttctaatttggtcgaatgatgtagcacaaggcagtaactgttttttttccttccctttatgtaatgttgaaccctggtttgaaagagcaactgtggtttgccaacttagtatgtaaatcatgtggaaagtggcatccgtttgttgaagcaatggttgttggacatattctcgttgatttttttgaaattcaacactgaagtcattgcttactttaccagtgagccatatgtaactgaagatgagctaaaattgatgctaagaggtgcagaattaagtggggcaatagaggaggaagaacaggtaatgaatattgggtttaatattctaataatatcactatatatttgtcttcaaaatgtttagccttttctgtcatttatagaaaacaaaaattcctttttataaagatttccaaacatcaatattgtttattgtaataaaaatactaaattagtttaaaaaaacgaactaatgtttttgaaaaaaaatatattattgagtcatatgaattaaaaaaagtttctttttcactaggaatttcgttattggtccgttttaagtttatactttgtaatgtttgaaaaaaccgctagaactactcttttaaggaaaaaatatagaaattaataattcgaaatccatttttgaattgagatttgaattaaacattgattgatgttttcttcgaaaattacgacaattcaatttgagtttttatgttgtaaggaaaaagataataggtaacaagtaataattttgtttattttgataacatttgaaatgaaatattgtattacggtttttataaaaaaaactttttttccaatacaagcaagctaggggaaaggagtcttgagacttgcatttaattctaaattctatgcatcaataggtttgttctaaaaaatgttgtatgtaaatattttcgtctcggattccagtagtgaaaaggaaatcaataaattagcataaataaattttcaatttttcgtatggaaatgagcccccatcatattttctaataatgatgtatgttactctattgtcatgcttctttataacacttgcaaaagccttatcttcattgattgttgtagatattttaatccacttttatgtctgttaaaatttaagcatctcacatatatataatatattacaggatatgattgaaaatgtgttagagataaaagacacacatgtcagagaggttatgacacctcttgttgatgttgttgcaattgatgcaagttcaagcctggtagactttcatcacttgtgggtcacacatcagtactcaaggtatttgaagatttcctgatttcaaatttacagtgattttacttttccaatgtgctaactagatcttgacgtgtttcctagagtacctgtttttgagcaacgtgttgataatataatgggtatcgcatatgcaatggatctgctggattatgttcaaaaggttaggagattttactcatcatgtttattgagttacaagtgctttacttattaattatatatcccccaatctcatagtctgtagaattatgatctgtttgattttgaagggtgagttgctagaaagtactacagttggagatatggctcacaagcctgcttattttgtacctggtaactttttttcatcattcatcttgagattacctatgttcacccgtattcatgcaatgcaatgtagccacagtacatataaaacattatttattttacctgatgattataattgggccagctatgctaggtgaggaacaacaaaaaagcagcaatactctattagatctattgtcagactttttttacatttagcattttgttaatctaaattgctggtgaattaaagcaagtcttttattcacccattgcattgtcatctttgctgtgttgattgtgttgctccatatatttcagtgcattttcagaatagattctggaggctctgaattgtcattctgaccaattcagcatttcttttaaaatttaaaaatgctaatatgctatctttgcttcatcaagatatctttttttcattgataaatttcgcaatatctttaattccctgtcataaacttataatataaacacaccaattggaagggtagcaggggaatgttcaacaatttggctttctgtcatgtgctagtattttatgatgaattattccttaatgtatggacaaagaattaagcagcagctgacttgctatgtcttgactgaacttaatgatcacaatccctgattttctcctcctattgaaattgaattgttaaactggttgatttgtctgggataggaatacatttatatcttttaacttggtgcagaatgttaataaattattattacgatttgcagattcaatgtctgtttggaatcttcttagagagttcagaatcaggaaggttcacatggcggttgttcttaatgagtatggtggaactgtgggggtatgtgcacaccagtccagaatacaaccaactcggatctttttgtctgacataaatgtgaatataaatctgtaaatttatgattcactggtgatatatacactgctaattacaaccattgacccaaaaagaagtatatgaaagatatcaatttgaacatgctattcctattcgtttagtttctttcaaaatcttttccaattatttatcaacctcttttttatgctaatttgaaatcaaagcaaacagaatcaacattgagatcattcccgtcatcatgaactattgcaagaatattcataaataatcctgtagaaatattagtttttatacatgtctaactgtgctacagctgtactcttgtaatatgttgtaccatactgtgtcttgtgctataatataatttaattattttttctcttactttacagatccaaaatcattgtaataaaaccaaaagtctttctggttacaaggcaggctattctgatttctaaatgttcttatttacccactattctcatcttccacttgcctttatctttccttgttcttgttacaattaagtttgaatatctaatggcagtgtttcttggattctgagttcgtttttaaatgattttatggtccacccttccacacacctgttgcatttagcaaagactgggtgtagacataaatcgcttttattgatagctaaatcgagagagaaggtttagttcttcgaacagtttattagattgtaacttgactctccaagtcttctgaaatccattccatataatctgcttataagttctaacaattttcagtttatcaaatatagatgccttattgatatttccatctaacagattgtaactctcgaagatgttgttgaggaaattgttggtgaaatctttgatgaaaatgactcaaaggtaaatgcttgtgcttaatctttactttgtttcttttaaatatatttttaaataactgaaagtgaagcatatattgaattccttcatctttactctgtttcaccaaaaaaaagaaacaaaggatcctttttattctgcactctttgtccaacaacagttttgtatggaatatttatttgtgctgactgcataatctttgtatacctttctcagttatttttattgtcttataactatcaacaatttagatgctgacaaatctactgtttaatggctactagtggtgctttgctaaaagcccagcttgtgttttaggctatctattttcatggcttcagattgctataattcaaagcagttaaaaaatttcacgttttttcaagtaatacaacatgaacgaactttatataaattaacagaatttacagaagtaaagaaagaggtcaaactattgagatggatccgtgtttatttgaggaatgatgggtttatgatgttatttcataactaggaagtcttgtttggtaaaaataaataaaagtaaataaattgttcttggccatattcaatgttcaaatacaaactctccaaagcatcatagtgtaaatttgtgagtacgaaattaaagtaaatgagagggtaaccagtaatgatgtgtaaacgtgataataatgcatataagtgcaagaagggttctgggaagatgtcaagatagaattcaactttgttagcaaaacagagatcagtatacaatttaagctaggtttgattctgaggttgctagtaattctacacataatttctgggtaactgataaactaactcagactgaagatagaaaatgatttgtatgctgaataataacctttttgataaacaaaatgcagcaaaaacatctgttttgggagttgtaagtggtcactctagatttgattgtgttaaataatttcatttagtatagtattcgtgtcaggatgccctcagtaggcagagtgcaagttctgccaggaagaaaaaacaaaattatacattttgttcaattctatcattcctataagtttagtgtacattgcttactcttaatgtttaactgttcaagtcattgtctctaacagcagtaggacattaatgcactttgaatttagctattatcgcctaattatgcatttgattgttgatgactataactatttgtttgctaatttttcattaaagaaagtttttacattctgtcctggtgattcctacaggaggagatacagaaaaaaactggctacatagtaatgcgagctgagggtgtttttgatgtggatgcaaacacttccattgatcagctctctgaagatttgaacatcaagatgccagaggtttagccccttttttacatgcaactgacatatttgtcttctcatgaccctgcttatttgactggagctagtgtgactttcttagttgcactatctagtcagtttatccttaaaaggggaaaaaatccaagatcacaattagtagtatagcaataattaagttgttcatgaatttgccattcagagtcattgtagacccatctttgcatctcaaataggcatccgctccattggatttcaaataggcatcatgccaacacatttcttatgctagcttgttatttctacacaagttgtggactaaattgggaaaatttgcaaactgcattatatttttggagaaatttatgctgataacaattgggtttcatgaatcctggggtttagatttgagttgacagcattgcaaaaaatccaagtcccacatcgactaaagataaaacaagatagagtatataagtgaagggcaaccctcaccccttgagctagttttgggggttgagttaggcctaaactcatattctaagaatctaagatggtatcagagcatatccaagatttcattcaaagggtcacccaccatgttatccatgcaccaaactcaaaagtgctaggcgtgagggggtgtattgaaaaaaattcaagtcccacgtcaactaaagataaagccaagatagagtccctcaccccttaagctctaattgataaacgaagcatcgtaaggatccattaacgcggttttgaaccgatacaaaactcacattctaagaatataagagacaaacaatgatctcattggaattaattttgcttacaattcatattgctaagtctgatgaagaatttcaggcctcctgatacgtaggtgacatctatttcagggtcaccaatatgagacggtatcaggctttgtgtgtgaagcatttggatacattccaagaacaggtgagtgcatcaaagtagttcttgaaagggaagatgaagatgataacaatgagtccaatgctgaccagcaggatcagaaggagaagaaccagattttcaaacttgaggtaatcaatctgttgctatcttaaattgccactcaagatagtcctattgatttttgcatatacagtccaaagttgaagagaatgaatggttagcactttgcacataaattacatcagcaagtataatgatagcataacacaactacagcatacttgcataagttgcatgtaccactttttagttttattactctacggttactcaagctacactaaagatgtcaatgtgattttcctcaaaaagcttgttcaacaagtttgtgctttgatttctggtttttgagcatatggttagtcattagtgaagcaatgtcagaggactcggtatattgtaccctatcaattctacagcttttccattttgtagggttctatgttgtcacgagattggaattatattttgcataatccttgctattttttaacttgtgtgagccacatttatagggtttcaaattaaaatgtttttatttttggcaatctgtatgaagtaataaactgaatctagaacttctccttagcctcccccatcccctttgtctttggaatagaaaacacgcagcttctttgtctttggtgcagatactagctggaaatgccagaaaggtgagcgctgttcggtttgaacgcataaataataatgatgaaatgttggagactaaagtaactcgcatggtccccaaaatcatgaaaagaaaatggagcagtgatgagaactcggacaatgatgcagaatatgacggagatacatttgcaaagagaccacaggatgacattcctagtgaatatttagttgatcaggaaaattctaacagaggttaagtttgttcgttcttcatatttttctcctttctttatacctggcatgcttttgtgccatttttgcaacagcctataagatggataaattatgatacatgtacaaaatgagaagcaatgagttcaagcatgtaaaaccttgcaaaagacgaattagaggagtctttgctaacgaaagtctttaaggctttggtgtaataaagatgtcaggtttttcaggtttgatcaaaacaatgaccattttttccaaccccctctcatacacacacacacactagcttagcactgctgaaacacagaaatttacttgtgtttcttcacaaatttaatggaattaattagaaacaactttcacttcctatcactgggaaagaatctgtcaccagattaaccagttggaaatagatgtttttatctctaccccaaattttaatccttatcaattaatgaacttcaaaattgtactttattcaatactattttactcttctttttttgaagtaatcctatttcactcttaactcccgcttgtaattctttatttataaaatattcaaggaacacatttttgtataaaaatatattataaaatagcattcttttttcattatgatgttatttgtttgaatatttttattttaaaagtaaatttgaaacggaacttaatataaaattcttaagataacgtagtcaaatgtacctttagggggcaaacagatcgagccaggaaacaacaaccaaacatgttttttttccacaaaaatttgtttgacacctttaaaagcaaatttaggcagtatgaaaggttcttagtgtttgaatttgtagatatgtaccatgattgttgtttcaatgttttcctcaaaatgtataaatgtgtacaagcatagtgaattttacttctctaatttttatttacctttaaatatgtgtgcgtttttaaattaaattggaagaagacataatttaattcccttgctattgatgctcgagctataaaaatcgttgttcttggtaagtggagaaaagaaaagagaaaggaaaacagaagaaactacaactgagggaattgaacttaaccctccacggcataagctatcaattcattccacggcataagctatctattattatcatgatttttaccaccattattactaccaattgtgatatttttagatgtgataattgagatttaatttttacatattttttttttattttatgaatcttttagagatatggggttacataaaatttaattaaaaatttaatctcaatgttatattatttttaatcttgacataatgattattattagttattattatgttctcacttaacgaagtgcgttcacttgagtcggactatgtaaacagtttcattaaaatacatgtttaataaattcttatcaaatgaaaactttaaaatttaattttgaaatatactaaaattagttaaaagaaagacttatttaatttgatgaagtttacatataatatgttaaaataaattataaatatattataaagagatcacaaatatatttttttatataaattcaaatgaattatcccatatatttccatcatcatgaacaatttgaacaataaaacaatattaataatgggataatatatagatcgtgatagactaattaaaatttgacagtttagtttaaaaagattgtgcaacggatcgagattctacatcaggaaatgcatgttttctaaaagattcaaattaacataattgttatacaagttaaacaaacagatcataaaaaaatgctacttactctcatggggtacatcaaatttctacaaaatcaaacatacatggatacaattttatttaataattaatttaggaaaatattatcaaataaatcactttctaaccccacatatgaatattagaaataacacatatatcacacactataactagatgacgatacaaattcagattctaagttcacaagaatacgaattgaaagatggaatcataaccaataacatgcacgcatggctagccgatgaagttgtgaactctcttcaatcttcatgcatccttggccacaccttcttcctcaaacatgctgccaccacagctgcatctactacttctcccaaaaagaattaattaagccatgcatgtgttgtacaaataattaatactgataatttaggccatatttaatttaatttgtcactgaaataaaataaaaatgattttcgataaacataccatctgccatcgtgcatatggtcataatcttcttgtttcacttctcacagtggagtggtacggtacctcaattacgatcttttgcagcaccataataataagtagaacatttcataattaacaaccttatgtgtacatgtatatcaagaattagctgaaacttatacagaatcatcaaaacagaacgttaaattctggaattgtagataagtcaacttgaaactttcttgacccagagaaagaaaaaaaaaactgaaattcaatgagttaagcaagttgtttaccctcagtcataagtcatattctcctcaaattagtgaaagagcttaattaagttcagtttcttcttaattagaagtacgatgatccaccatcagacacacatgtgtatatatataaagtatgtgttcaactaattaacttgctacattggcgcgatcttatggattcaacgcggttgccataccgcattatcaaaccaaaaataagtcaacctgattatgttaaaaatcattattgaatcacgtggatggagatgcataattttattttatttttaaaaaaaatgctttctttccgtgaaatatgaatatttaataaattataaaaatcttttaattgccatgaacaaattaagatgtaattttttttctttttcttttgtaattttcagcagtacatttatctgttaccactcacgacccaagaatacattctgataacgttattctcttttttttttaaatgtaatacgacgatgacactgttaccgaagtcatcattttatcaattgattatgtcattacggaatctgacttgtaagttgtaacgtgttgtgatcgtctgagaaccatgcgtgggactcgtgcatgcaacccttcttgataggagtgtttgtagtttggattggattggttttgaagtaaaaaattatccgatccaatctttttagtttggtcatttaatcatttattcagtttgaattttttccatccaatccaatctaatttttttcggtttggattggatcgatctttgattttttaaaaaaatttaaaaataaaacttatgagacttatttttatcaaaataaggagtatctaggataaaaaagcacatttattgaacaaaaataaatatcattttctaatttttattggacaaacatatttattggacaaaataaggaacaatgtattgggtttttgatttttgggctatgatagggaataggcccaagtaggtaaaaggtaaggtaaggtttataattggatcggtttggattggatcggttttcaccaattaaaccgaaaaccaatttaatccagtaaaaaatttcgattttttagattttcagtttttcgatttttcagtttttcggttattttggttatgaatttttcgattcggtcaccgtggtttagatcggttgatgaacacccctactccttgatagtatcttaattacaaattcatcattcaaaagtcaaaactttattcacaagtattttctatttcttttaagatagaataatggacatttggatattacgtacgctaaacatgtgacttatagatgtatttttaaaaggaaactatatactgttaataagtcaattcaatagctgataaaaaaatcaattcaataaagaaagaattcaattttcatatataaagttaatgtaaaaaaatgaatttgtctgattgactaaagtaaaaatgagattaactcatcttgaataactaatagaatttagataattatcttaatataaaattttatcattaatgttaactaccacatttaatacatcatctttaatttttttatatcatttatgtataaataaaaactttatatttgttaattaaaagctaataattattttataattcactttaagtaaatagttattataaaaaaataaaatttaggaaaatagtttcattattttacaacttcaaagtataataccttaaacaattttccatcattttcattataacttttaattaaaaattatagataaagagtataaattttattaaaagttatagataaaaattataaaattaaaattacagccatacatatttttcctaaggtgaataaagaatataaaaattaaaaaacaattattaagattttattattttataattttattacatatatatttatgtattttattataattttaattatcaaattttaattttacacataaattatataaacaaattaaagatggaacattaaatgtgatattcatagcattggttaaattcaaagtaagataattatctaaattatattgattattgaatataagattgtttaactccatttttaattgcggtcaattagaaaaatccatagaaaaattatacaatcaattaatcattaattattttatatattgtttgcaaaaattaataaactttttctaaaaggacaaaacaaatcaataaacttaacatatacagcgattatgtaatttgatcacaatgtaaaaaaaaatatgtaaacttacaaataaatttatatatatacatacatatacatatatatatatatatatatatatacacacgtatgtgtgtgtgacttttattaaaaatagtttatatgtgcattatttaattcgacacaaatatcttataacagaacgcgtatcatatgtaaattgataatttgattatcagtgtgaaagatttgtgcgtggattaattgactaaaatatgcaaagccaactgaggacagatggaacgaatctaattaagtaagaccatactaattaaattattaattaatgtcaataattgagggagcctgatatttttttatactaagattaaatataggtttataataattcatataataagttcaactaattgagttaatttttttggctgagggagtatgatatcttcatagagtgcatgaaaatcatttaatttaaatttatttaaaattatgattaaaaacttatacatttctgtaaaaaaaaaaaaaacttattaataagtactgtaaaataaaaatttgagcgtcaaatgtcaataattccttaatgatgaattaacatttaaatataaatataaatagaaaaaatatgggtgttgttgacttctgaaactaatattttatctggtcacaccacaggggcgcaaccttatgtggcaacggttctcttcttcgatccctttcttgcacgtgttgttaatcttacatgttatgctccctcttcagcctttacacttcgtttttaggtcagaaatctattaaaacagggagtcacaacttcacaggaattatatgtctaacttttcattctaacaaggagatatatactatgcattagaattcatttttcaatatttcttttgtttatataataaaaactcagtataactaacctctaaaattctcaggatgagtctgcagactacaagtgacaaatcaacttattttactcatgcttaatttattggtatgccttttgtttcacacaatattaggtgaacaaaacaaatatgtagacccaaatagatagatgttcatgtactaaaaatatccatagacactcatgtattgtcaatctatacggatatacctaaagaaagaaaagtatagatatgatatgagatgttacgtgacaagaaaaaaagataaagagaaataaagagtttcaatcaaatatttacagtgagtgagtgtttacatatctatattctacatatgcaacatgttactatcctagcatgcatactaaataggcaatacaaaaagcttaaattttattgaatttactttagattaaaaaccctctcgtgacttaattttttattttttagttttaagcattattttttttatatatttttaacacatgatttaaattttggatattttaatgattttaaaatatgtcttaggtcacgtaatcttcgtcctgcgttaaaattaacgtagctcgcgtaagtgttgaatgcctggctagcagggcgtgacctacaacccactttgagattgggtttgaactttgaacagaaagactaacctgttttttatgcagcccaaaatggtcctaaaatattatcatctatagtccacaccatcgtaaaaaaaatgaaatactaaagagaaaaaacttagagaaatcaaataatataaaatgaatgtaccaaaaagtcattgtccgattgattctagattcaatcctctaaagtaaggtatcagtttaagtctgtttatgaaaagaaaaaaaaattgtaattgagaagagaaatttcactaaaagtgatcagtcaggtttttgacgtaaattaatcaccgataaatttaacaaatacttcacaccagtaacatattatccaagaaatataaaatgaatgtgatagagattttttttaatcctctcccgtggttttaatcagttttgggcttaattttgcaagataagctgtaatccaagaaaagagaaacccaaacacacaattaggtgttgtggttttctagtctagctacaattaatttgcatcctaattaactgctccatttgcggatcttgggatttattccagaaaaatgggtgcaattcagctgtaaccttagtgacatatatacacatcatgacaagaagattcattcaagagagtcactctccctttattggcatgcattttaatttctttcattcataattccctcttttaagttgacatacttggtcacttattcggtgctatcatggtagtgaaaaatctgacaacgacaacgctggaaaaagtaccatgtgatcaaaagccaaagtacaatacacgaaattctttgaataaaattccttacgaacctacaaacttgattggatcagtatgaacatttatgcattatttgaatcctaaaaatgttcactacacgcacattatacatcactggcagcacgtgtttttggaccacttttccaaaatatttgagtcaagtagacaaggttggccataggtatacgtagcttgtgtatgaagagtgggtgtgtttgaaacattggggcggggaaaggttgtgacgtaacggaaccattaatatgtatgtaccgttaatgtctctcatcttgtttgcaaccacatttatgtagtattgctgttaaagaagtagtagaatttttcttttttctttttttggtcttcgaagaaatcactaaagactcgttcaaataaaagtagacaaagtagacaataaggatatagtgatggcaactttacagagataataacgactactgctacgacctttatctttctaatgaaaatagtaaaaaaatacttaaagcaattaagatggcaagatattcatataattttgacaaatttatattatgagatattataattgcacaactctaattatacaaattgtgttttgaagatacaactcacccgaaaattaaaatatttccttaagccactctttattttctctctctactccactctttattttctctctctactctatatatttcgtcacatttagactatataacatcattatcattagatctctcccttattaagcttttacatacccacattaaacatatagcttactagagtgtcttagtatttgcaagtcaccactcatttctctctaaacaattattcaactcctccatcactaaattgttgaagcactctccaatccaccgcaattataaatccctctgacccattatattcccactgattatgttggattatcatcgataagttcaatttcttccattaaatctagaaaaaagttatgccatcccataaagaaagctaaatggataacaacattataaagaatattatcaaagctaacgcactatatatcaagctaaacaaaataaacttgttataattgaaaagaatattcaggcgactttgtagaacaaactcacgattatatttgacaagtaaaacacttgatctctatataaaaattaagcgtctctttggagcggtaatgatttttaatacatttttttatatatttttttcactttttttaaactaagaaaaacttttagtgaatttgatttttaatttaaaaacaaaacacacatttttcacatttgtaaatgacactttttgttgtcaataccactatcactattgtcatggattgctattgccaccgctaccattattaccattgttgtcactactataattgactatcaccaccacgatcactaacaatattatcatcattatcattgtcaccatcgtcgctaccaacattattaccaccaccactaccaatgtcatcattacaactactatcattgtcaccaccaccaccactaccatatccgtcatcgtaccgccaccaccctcaccaccaatgttgtcgcaaccactaccatcatcaccacttgttgccaatttaaatttcacaattcaacaccaccactatcctaccaacatcattgccgccaccacatatgtcatcgccactaccaccaacatcaatgtcattgccactcttatcgtcattgtcactacctccatcattgtatggtcaccaccccatcatcaacgttgctgcaaccaccaccaccaccacatcgtcaccactcactgccaccaccaacaccgctatcatcaccgacaccattgacatttctactactactttcgttgtcactaccactaataccattttcgttatcgttgttgtcaccaccaatactactatcaccaccatgttgtcattgccaatcttccaccacgaccaatgtcacctttaccaccaccaccaccatcgtcaccaccattggtactgccatcatgacctggtatcgttatcgtcaccaacatcattattgtcgtcaccaccatacaaaaacattcttaaattaattttaatatgataagaaatattttaaatgaaattatttgaaactagttatattttaagaactgatttaattttttaaaaaactaaaactaaaaattgattgtaattttttaaaaaaattgaaactcaaaactaaaaatcatcttaatagtacctaaataacctaattatacttttggtcaaatattttagggatacgggattttgatttctttagttttaattattcactttcagatttttttattattgaaattaagtgtctttacctcaaaatcatatctattaatttacataaatgtatcaattcaaaggtatgacgtataattgatttatataaaacaaaaaatattaaatttttaaacaacaaataaattgtacacaaactatttatttattttcacttaattattttatatatttttcttgtacaaatcagctatagatcacactcatatcacatttgtatgaaatattaaatgaaaatttagaataataaacctattcaaacaattagaaaactataaaaattaaatacgaaaaattaaaattagaaaactaaaatcatacatacataaactaaaaatggaagaactaaaatcacaattaagcctaacaaaaaccacttcgatcgagcattggccacaaatcaaggtttgagtttgaccacccgaaaggataagattatggaattgttgcctttcatttgatacccctccctgaggtagggtctaactaagtatataacgaatataaaaatgaagtgccaaatctgcatggacaagatcataaaataaaactcttggggatgttgtgggctctcccagaaattcgaggggcctccgtttagcatgacaaagaacacaactcaatgagtgtgctgtgtgcatacatggtgtggacctttcagcaattggctgtgtgatattgatttatttatgaactttttttatatttaaagaagatgtggcattgtcctatctatggttgtgtgtgttccctcccaaacaaattgaaatgtaaaatgtttgttccattctttcaccacaagtccacaaccaaccctttaatccttagcctctttccaaggcctgtattttccctcccttggtccccgctttacaagatttgagtttctgaatctcaaggatcttatgcaatggcacccattcaacttgggtccatatctttatctattttttaattccttaatgatttttttttttcaatttaatgatcattaaattaaaaatcaaagaaaactaaactctaactatagagaaaaaaaaaaaaaaaaacccaccttgtgtgactcaaaacttaggagacaggcatgacaaaaattgccgaacttgttgtgcagttgaagagttgaagtactaaattcagcatgttggattttccaaattattattatttttttttttggaaaaaaaaaagatggtgattctagtaggcttttttaccatatgaatgttttttttctcttaattactaaatggaataaatcgtgtcatgtgatatgatttttttttttccttttttttttattttcactaagaagtcatgccatgacatctgaatgcatattttaaaaaaaaaaaaatagaagtcatattacttagtatgatttatcttatttgataatttttttaaaactcactctaataagacaaaaaaaaagtccccactatgaaaaagccgaattctagtaattggggtagttccaagctcgaatattaagcaaaatattttgcctaagtatctgactattcaacatccgtgattttctagaaagttttaaattttaaaggaaaaaataaaaactgcagtcactactttaatataaagtgtgtagaggtcactatatttgattttgcaaaaaaaaaaaaaaaaagagagagagaaccataaatggtgtctttgctactacttggattctgagtcttttcaaaaagcatcactctgtttatttttggattaggatgtcacagctctctgaatgtaagtgaaggttattgtactgggagaaaaagtttgatgtggaatgagcaaaagttgaaaaaagtttcattcttgaaacatttgcagcattgtgtatatcctgttattcgatgggtatattgcttttgaagattttgtttttatttgtttgcttttttttattctctggacttggaaaaagtttgacctggaatgaggaaaagttgaaaaagtttctttcttagaaacatttgcagcactgtttatctccttctctttgatggatatgcaccttttgaagatttgattacctgataataagatgactgctatagagaataactataataaaaaataagataagatgtatattatattaactattatagataattattcaaaataatcttatactagacatatcttatataataacaactattcgttaagaaatctatcttatcaaatcctatatattttatctaattaacaactattcaaactgaaagtctaatattttctataattttgtttttaattatttgttcttttttaattctttctgggtagaaaaagtttggtgcggaaagaaagttgaaaaagtttcattcttgaaacatttgcaacactgtttatctcctgatctttgatgggtatgcagcttttgaagattttgtttttatttatttgttcttttttttattctttggggttagaaaaagtttggtgtgcattgagcaaaaattaaaaaagttccattcttgaaacatttacagcactatttatttcttgctctttgatgagtatgcagcttttgaagattttgtttttatttatttgttctttttttattctttggggtttacacagtcgtttgagattataccaacttttctttgttttgcaaaaaaaaaaaattggacctttagtcaccaatgttgaaatgtcagtgcccggtttttaatttgcaaatgctgattcgttttcttgtaaccatttgttctgttgcgactttctaatggtgtgtgtgattaatgcatgtggatatttctgagcgtgtttcgtactcgtttccatattaggagcaagacccatttctgggctgcattaaagttacttcctttttgggtgatgacagagaaaattgaggaaaatataatgcactgtggagtgttttcctattctaagacttaatcactgttcctgtattgctaggtttttttataatatttgattcttggaatagggcgcctttttgcacgagaacatcacctttttttttttttttttttgtttctgttggatttgtggaattacttcctcagaatttgtacacttttttttttggttttggttgtttagtcaattgttatggtatattaggttttcaattttgttttgtaagattgggactctggtttttttgtaccctatatatgtcttgtgctgaatctttgtgatgtggttttgttgtgtttctttgtgcttgttttgtgagcagtattcactaaattttgtttacgcgggctggactttttgcagtaacaagagaagagttatgtattctccatacacaagtatagtcttttataaaattcagaaatttgagccagagaatgctagaaagataattgattatatcttctttcaaggccatggagaacaagaaatggctaaactggcttcataccctgactatttcatccgtgaagtggcagttcaggccagaaaggaactccaaagattggatgctaaaccagatatgctcgcaatgtcacgtactgtaaaccctcagcaaggtttaagtgatttatcagtaatctcccctagaactcctacttcaccaaactttcaagtgcctcctccctattgggatccacaatctgctggcaacgtcaatccaaactttatgggaacgaattacttggattctattgtagaacttcagaagcagacacagatgctcactctggagaatcaaatagatgctgtaaaaactggaactggagggattgccaatgattactatggcttagatgcttctgctgccaatttgggtggaaaagctgggagaaggttttctgaaccaatgaagatatgtcactatttcaacaaaggattctgtaagcatggaacttgctgcagattctatcatgggcaagttgtccctgagaaattctctcagatgtatggaaatgatgatattagtgaggatcaggtgatttccccggggtcactggcacagttagagtctgaaattattgagctcctaagaacaaaaggcggtccaatgtcaattgcttccctgccaatggcatactacgataaatataaaaaggtactgcaagcagatggttatttaaccgagagccagcggcatggtaagtctggctatagtttgacaaagcttcttgcacgactgaacaataatattaggctaataggcaggtaaaggcttatgatttttttttttttttttgcatttattatttatttagtgtttgatgtttcttactctaatttggcttttgttgtggttaatttacagacctcacggacagcattcagtggttctggcagaagatgctcccacacaaatgcaaaagggagattttgctcgaaatatcagtgcttcacggcaaatatatctgacgttcccacctgacagcactttcacagaggatgatgtctcaaactacttcaagtatattacatcttttgttattaaagtgcatgttcccatttctttgcagttgttaattatttgcattaatgaactgacttttatatatttcctttgtagcacatttggacctgttgcaggtgtcagaattccaaaccagcagagaaggatgtttggatttgtgacatttgttcattcagaaactgtcaaaactgtttttgataaggggaatccccattgtgttggggattctcgggtgcttgtgaaagcttaccaggagaaggcaaaggttaatgaaaggtgaattccctgtcttttcctttcaatttttttttatattggaagttcttgtagttttatggtttgaaattctcatttattcctgtaaatgtagttattttaagttaatattgtaaaataaaagcttatattttttagtttgaaatgactacataattgtcatcaatattgctagagatagcataatttgatgaaaatttattccttgctgttgattacttgattcccttgttcttagttcttcctctttgttctcccctttccatttattgaaaaaaagagggcaagagacaaaggatgaaatccatgtgtctaatttacacaatcttttatttataatgagtcataaatacaatcaataatggttaccctaatttacataaatacacacagttccctaattacaatatttgcataatttctaacatatttacatagtctctcatacatgtttataaatcataggcaccaagtttatcacatgtaactaattgtgtttggtcctcatgaaatattggatcttaggcaatatggagctgcctgattgtcacatacatgtgtcatttgtgcaacttccccaaacctgaattctttgagcatctattttaatcacattagttcacaagtggctagggccatggcttaacattttgcttatgcattggatcttgcaacaacactcttatttttccaagaaatcatggtatcaccaataagaatgtgccagaagtgataccctgtcagtagggagagcctgctcaatctgcaatggaatatcccacaactctagtcgttcttttgtcgtcttacaggagaacttttctagcttcttcaatatattgtaggatgcaaattgctgcatccagtgtccttcacagggaggattaagtatttgacttaccacattgactataaaagagatatctggatgagtaatagtgagttagttcagtcttctaaccaatggctcaccctaaatggtagaagcttggcattaggatccataggagtgtctacaggtttagcatccatcaacttgtctcctctaagatatccattgcattctttctttgggaaatgacaataccattcttggattgtgtcacctctattcccaagaaatattgaaccttgccaagatattgtccaaaatgtagaaagagatgttgctttacatgtacaatacaataatgttgttgtcaacatacacaaccaagtaaatcaatcctgtgactgaatagcaagtgcattgtttgaagtgtgaaaactagtctgctctgtctctctctattctttaaatgcaaagtaagatggacaaatgtagtatattgaattggtatttacatctaaagaaatcttacgtgcttctgcttatataccttttggtataattctcttgggcattgttaatgtcttcttttccccataatactttcagtgttcatttcaatttggatgcaggaagtacacagatagaattgagcaccctgtttgttattcaccacgctctgtagatgtcgacactgaacttaactcaagtatgacattatctagtttataacccaaattatttcttatttcttatggttaacaattaacttcccaatgattggttttctcatccaagttatttaatgatctgctttctttctgttcccttttgtgggagaagcctttgtacaatctaatgcataattataatttatttagttccaagaagttttgggaaccatagatccattaggagacagccacaactaattgaagaggaagaacaggagcaagtcctggaacttcagaggagaagtcttgcacagctgccgtttgcccaaaaatctttctccagttcacctcattttggcttctccatggatgagtcaaggatttcagatggtgtgtgataatatatgttacatttctatttatcaagtttctgtatgttctaactatcattctgagttatattgattgaaataatttctcatgcagatcacttcaatttccagccagcagaagaatctttcagttttccactgcatgccaaatccaggcatacagactccaattactctggtgaggacaggtatgcatcaatttccaatagacttctctccctctcacattctacttcctacctgttttgtatacattaggcttaattgtactttttgtttctctactatggtcgctgggattttgttcccctaataatttttttattgaatttagtccttcagttttttgttattataatcaagtcctttcctatataagttttcttttttatctaaaactctcaaattctcaacttttgtttgaaaatctctatgaaccagatccattaaaccattttaaatcatcttttgttcaaaaccaagcaattgatacattattttaaatcatcttttgatcccaaatttttgtctttgaaacctcaacattgtacactataaaatgttacacattttatcaaattttgtattgtgaacctttgaagtcattttctatctcattcattttaaatttctagttatttgagttgtaaataactatttgagggttttatttaaatagaaatgatagaaggatttgattgtaaccattctgatatatctctataccatagccaaaccggtaaatcccataaacaatagttcctttcatgatttgtaaaacactaacagtatatttggatggagtattttaaaatttcaggaaatttaaaattcaggaaaattaaaatgcatcaattaaaattcttttattttcaaaattctgtgtttggataaagaaattaaatttcttcattttcaaaattttgtgtttggataaagaaattgaatttcttcgtttttaaaattttgaacctcatgcatgaaaaagaaattgtacttgtgttgggacggagcaaaaagttgtgcagttagagcttctagaaaagaagagaatttcaatttctcacctttttagaaggaaattcaaattccacatttttagttgtttaaaattctgttttaaaattcaaaaaatttaaattcctcacataaaaatatccaaacagtgaattttaaattgaagaattttaaattccctaataaattactttccccaattaaaattttctatccaaacacactctaaaagagatttgtaaaacactaaaagttttctttcatgatcttggctggagtagaacaccattcgttttgtcaagtagcaaatacgagacatagtaaaagttacctctgcttgtttacaatttctgtgtggatgatatcatttgtttgcaaacatgcagttttgctgctatacttttcctgaaatattttgttgactatggataatgttatttatttactttttaatttttatccagcagtcaaggactcaatctcccggacagtccattcgcattttcactagatagtgggaggtaaacagtcatagtttcagatacatatacaagaaatatagagtccaaacagaatcaggccaatggtcgcagctttcttttgatacacaatatagttcttctatggaaatatttctcaattagtgcagtaattttagtcaaaattccagctagtgcatacatgctgaagaagagacactggaagaattttctcttcacaattggaattggtggcattaacaaaagttaaatgatacatgtaagaaggttatagcttttagttacatagcttttagttacagataggtggcaaaacgtttgaattttagatcatatagttatgagttttattcatgaagtcattagtaaaagtactaggtatattattgtccaaagttttaattagattgaaggagctcttagaatccgtgtctatgttttgaggaactaatttacttactatgaaccgctttaataatggtttattgcaagtccattaaaaaaaaaaaaaattaaaactacgtaccagagatttcatgcatgtgcaggtaagggggagagatattatacagtcttattcttgcatatgcaaagagattgtttttggatttgaattcatgaccaacaagtcatgggttactaaactagaaatacatagtaagttatgctaaagtagaatcttgaattattgttcagggttgtcatgttttcaggttgaatttttctcactttaaaccactacaaattccatccccaaaaaccatattttgattgtgcatcaactatatcaactgtatttaaactgttagataatccttggtgatgacattactgttaccatctctattactgttatcatctctatttaaactgttagataatcctaatcggtgatgacattactgttaccatctctattatagaaccgtacattgagattttcacttcatacggttgtttcccctacataactttctatctcaaagaaaaagtatattatcgtttataatgctaatgctagataagaagcttgattgttttagcttgcttttgcatcatcaattactgttcaattttcttcatgtaattttcgctgggaaaatatgcttaacgaatgtgaggtattacatgatttaggctagcaggaccaagataactcgagtaaaatatatgagaagtatgaagctcatacagagaccattattcattgtgcatatacgatacgaacaatattagtcacaattcacaaacgaaactttataacaccagcaagataaagtttggaagatggtaaaaaaataaaccaaaatcacttttcgtcattgatgaggaaacaatcattaaataaagcttgccagagcatcatcgtccattccattgtaagcaacatgacaaaagttatacgagccagaaaacaatttttaatttgttaatatttggatggcaatttatttgaacgtgtacctatattgaaaacaatgtttaatgtaatgaaccttaattttaacctgtctcttgcatcatctgctattcctgtgaaatcttaatttcaaaaaattaatccatttccaagcatgtgctaataatttctcgtcatttcttccctgtaatcatccaaaaagtatcttccatatccagttaatgatgcggatacctttgtttttatcataataaaaatatcaatctctaacatgaatctacccatgtttgattataagaaattactttattcattcttctgagaatacacgactgataaattacaccaactcaacataaaccaagcaaccccctccccaaaaataaataaatccagaagatagaattcaattactagtactgaagataaaatgaatgttatttcaactcatacatgtgatacaaatggccgcggggtgacaaaaaaattatgtattggtctggtgcaggtgacaaaggtaacagaagccctactgatctcagatacacaaaagaatgaaaacagtaaaaagatatatctacacaaacacatcgttggaggtaaaaaggaaacatgagagtagcgatgacagaatccataagctggatcttagagttaaaattgatacaccttcaatttataccaataaaagtttgcaatatggtccacaacctgcgatatgttagagacttatggttaataacagcatacttaatgtattaattattaactaacaaaccagctcaccttagggtgacaaatttcaccatgatgtgttctgcttttcagccacaagcacagcaataaaaaacttcacaaaagtagttgggcagcttctgctgagaatcagacactgatacttgagtgtgtcatgaaatcatgtgatgacagtatgccaaatagccagctaaactctaattattgagcttcagccacaatgcagaccatcacgaaaattttatagcaacatgttgcatgacaataatattacaacagattcttcttccagtattcatgcaagttgacagatacaaacttgattctgatctgtcacatttttctttcatatttctcagcaaactttttaagtaataatctctgacgaaatgccaaatatttatccaaactagttccagcccactgttggcaaaagcattcatcagttggaactagagatccaagtggaaatggtccttttggagctttctttagggaaaccaagaacctatgacgaggacgaattctctggtctaaagataagctaagatacatcgggtatttggtcaaggattgcacctcattgttaagttcattaaccaagtacaaatatttgggctttagattctcctccaaggacagagatagcacctgcaggcacattagtcaacattaacaagagatacaaactgttcttcacattataagtatgaatccaaaatatacaaaaatatacaacaatgtcatataacaatatattattttcctagttctatttgtgcaaatgtagggcatcctacaaaaacagtataaattggaaaggaggaatcgaaattaggaacggtaaaacagaataattttcataaactaatgagggaaatgcatgcaaaatgacctgtgttaggctagtcaaaactttcacaatgtctgaatttttcattcctatgctccttaggaaatttattcttggaagtaatccatcatctatgctgtaatggagaagttggggatgttttgtcaccatcttcacaatgctatctctgggtgcacccaactctttggtaagaaatatacaacgagtattccatgaaatgtcaattctctgcacaagaatctggggactaagctgaatgaccttacccaaatctttttccttgataccaacttcctcaattaaatacctaaccgtaggttttaacgaattctcaacactataagaaaacaaggatggagcagcagcaacaatttgccctattctagaattaggtatgcccaggcccctcaagaaagcaacacgagacttcaaattgttctccactgtatactcaagaatttgtggctgcctcaaaaggattcttcttacatctctttgtttaacaccaatactcaataagtattctaacctttcctgtgcggaacacacattaatttgaagtgattgcatgcgtctctcatacatttggacaaagtgtgattccttcattccaaaagtgcttaagtaatcaagaagtggtaaccatttcacatccaaaggaatctcctcggacaaccgcggatattttttatcctttacatttctactatgctgcaacttgaaaaaagaaagataaataaacataaggttcaagagcaccacaagtacattaaatggcacaatttgacagttcacagcttactgtatcacgatttggtacctttccactctcatttctttgtaaggatgctactctctcacttctaggcaatctaatgctttgttcattgtcaaaagatctcaaaccccactcctgttcctgttgcctatcttttcctgcacaaacaagagtctgaatattcaacttccccccttaaaactaataatcaatataacattttcaagcatacctttagttgtctttgacttaaatctcttgttgttattaccatctaagttagcaggctcagaaaattcctcctgcacacatgttccacaatgaaagggaaaattaacaaataaagaaacaatcatcatcaatatcaaatttcaacagataattaaacattcctcagttttttacattggactaaagaaacaattcaaatgcataattaaaaaacccacttcacccatcaattgaattagatattcatcctagaatttaaagaaaacttttgaccacacacaatgaaatcacaaagctcacatcagaaagccaatcatcatcgtcgtcctcgttgtcgtcgacgtccaactcttcatcgtcttcgtcgctatcgtacagcgacagtgcctctccatactttgacttcctgttgctcttgataatcctcggattggaatgtgctgcaagtttcaccaaattcttcaacctcgcagaacccaaacgctctctctcaaaaatccaaaattgagaacaaaaactcgaaggagtcgaaaagtatagcaatggattataaggatagtgaggcataacagccgccattgttgcagagagaaacagaaaaagaatatactccaaaaccctaataatcagaatctctgcactcccagaggtttatcttctttctatctgaaacggtgtcgtttttacttaaaaccatatctgaaacatgagtcacacaatgtaacgcgtaggtggcgcgagcccgtgggctaaaaaagcccacgtggcattgtttataacggtttggttgttgtgaagtgtgaaatgaacgagcttggtcagttagttaccgtaccatggaagcagtatcttcttctttgtctctgctttcgttagggagtgtgaaaactaggagcaaagtctcacagaactgtcatgtgactcaacaaagacaacgttgtaataatgtttgtgttaagaatgcaagaagaacaagggtggctgctgtgcctgtgaatgttgatgatgtaaccacagtacttgaccctgccccagtggaagtcacatggcaaattgtggttggagctataggtaccttaagtcacacagcacaacctttgatattttactttacttgtgatgtttgtttttataggacaaacaaaactttggatgcagtttattaggtgtttttgatattgttattcttaaatcaaattagagattttttttttatcaataatctgcttaataaagatttgcattaaacatgttatcgagatgaaacttcaattctgatttgagagcagcaccaaaagactgcagttatattttgtgcttatctttatggaaagagaacggtgttccgaaattgggttttgattttgtgtgtttgaattttgcagctggggttaccccttttgtggtggcagggattgaatttagcaaaagaattgtaagtcagtcttttggttgagctgctaactcataagttatgaagcccgtgtgtttcatgccttcattgttggataatgttacagttagctcaaaaaagatgtgaggtgtgtggagggtcagggcttgttcttagggaaaaggaaaaggactatctccgttgcccagaatgtggtatgatagcattcacttcttcttctcatatcatgtactctatttaaccaattaagtatgcagctgggagaatgttattgtatgtctctgaaatattcctgatttatggggctttctgatgtctcagtaattgaacatcaaattcagtatcttgaatgtgtgtagttataaattatttggatttacattgaacacctaggaattgcagaaatccctgcattcccaagctaatttgaatatctattgtcaacctgagaatattttgatgttgaaaaggagatatttttcatagatcctctttcttttggttcacagtttctttcattttggttatgagcagctatgacaagtgtatgatggtgaattctagcgtttctttagtaattccactccagcagtgtaattaaagtaccattggttggtctcactcatgaaacttctgtttcaaacccttaattattctgaaagtttaaagagaaaggaataactggatttcacaaccataatatcaatttagaaactttgtaaattatgatcattagtctgacctgtaccaataacgttacttctcattgctttgttgtttccctatttttcttgtcatttatgttttgttgatcaacttttaactaagttattcgtgtcaaattgattaccttacagtccttcatgtgctgtatatcgcaggtgggtttcttccttggcaatcctggaaaagattcttctccggttaatttctacagcattgtactaaaaagcatacttcaacaatgacaactttattttagcagagattctctgtttgtgataacattctctattatacacaaatgtaaacaacatagtaaagccatttgcaatgattaccaaataaattttttttaaaaaacattgtaattccttttttgagagaaatggtatttgctaccttattgatatactcaccctaggaaaaaatttgggtgcatcaatgatgaaaaataagaatgaggacttccttctgtgataagatcaagctgctgcacatatatccgatggctgatttcataacaatgtagcttgttaccaatattagactattattttttatgctattggaggcattttaaaggtgaagtcttgatatttggactgttttttttgaagtggtagaagcttggttttctagctgttttttcattgtaggttgttcctgtgtctaggattctgattgaattgactccaattttcagtaatattcacatggataggatgtaatcagactggcttacacagtaaatgcattaaattgatagagcaaggatttaaagccaatactagtgaatttagcttgggaagcatgagcaagccattattgcattttctgtcgcatacattgtggacttaatatattttaaaagaacttttaatgcaactacgcgattaataaaatttaaaatgtgagaagttactaaatgtgttactacttgttactatcttacaagtttgagaacagatgtttatttgaccttatccctttttccaaataatgtatattcttaacaccaatcatgcccaaattctccaagttttaccgtctatttcaagctacggatagttgttgaacgaatccagaattgaaaaacagatgcctcttgtaaagtctctcgaggccattttatcattttgaggttgattcgtttattccacttacaatatacctcgtattaaatcctttatatcaatatcaataccaacgccatatataagaagattcttttcaaattaggcagccatgattcttcttcatcttcatcttcttctctataactatgtcattactgatgtcacatactcgtaattgttacatgacgcttggctacctaaagtagtctacacgaatctgtaacaagatcttccaaccttatccttcgtatactgtccctacttttaggtgtattgtcttacataattgataattatcttaggactttatcatattgactttgaagagtacatgatcttgcagtaaggtaagactttactgacacacaaaaaagtgccacgttgataaatttatattatgatgattattttttctccattctgaaataatatatttctttgtgtctctaattataagatattattttatttatgagatatagttaacaaatttttatttttattataagatttaattttatttctcttgtgtatttcttattttttttactaaaatatcctggattgtctctttctctttcctatagagatttgagaaagattaatcgatttccaataaagttaaagataaatttgaaaaaatattataattatagacaaacttaatattaataactaaattaattaaactttttaataaacataaattagacaattatttctcatagtcaaagagatagagggagtagtattttgtttttgtttttgcagttttgcatttaagaatccttggcttggtgcttgaattagtacacagccacaattttggacttctaattttctatctattaaattgcatttaatagtattgatggacttcaactacaaaattatgctactttattgcgtccctttcccgctttctaaagggtgatgtgatgaaacggatcctttgctttgcaaccaactctctctagctcaacctccatcaaatcacagtagaatattacatctaatgctgcacattaattggtcccaattggtccatgttaatggaaattggtcaattgtttttggtatattggtcaatactgacaaattttaatgtcgattgactaattcacaaaacattggtcaatcttccattaacatgcaccaatcttacgattaattgattagtcgtaaaacaagttaaccaatcgctagcctcttaaatgcaatgtatggttgtactagatagtagtaatttgaatcgggaaagtttattagagaagattcaaatttgtaatgtgacattttaacaagtttgttgagtatttaaaacattttattactagtaattgcttctaattatttttaaaaaatattagatgatttgtatttttaatataacaaagatttttataaaacattttctatttttactttcagaatcatagttctaaacgcattcatggggcttcttcttcctttttttttttaagtaaaagaagaagaaaaatagtaaccaccaaaaatttatgacgtatggctgacaagaaattcatgtcatcctatattacgatttatgacgtgaacaatcagggtgtgcagcatgttggtgttgaattgaaacaaacagaaaagaacaaagtgaaaccagtttagttcaaattccaactcaacttccagaattggatagcatctaaagaaattggttttgcaacactcgaaaggaacaatacaaacacagcagaacgtactttaagaagataaagatacatttatgcatgtgggtgtgattgctcgtgaaagggttgaagccaaacgcgtcaagtttgtgtttaattaaaaactgctcttattgttgcaattataatgacgcatatctgcatctataaaaaatggggagaagaaagattattgatggtattatactaattaattttatcattgagggcctacatcaattcacatgtgattgtttcaatttaattaattcagatttgagtttaaggaaattttttgttattcataattattgtaactcgaattgtttacggtgaaagataaatatagtcaataaaaaaaatactaattaatgcctaatttccatccctaaaaatgaaaaaaaaaaaaaaaaaaaaaaaccgtgtgggggcaatgttatcaaccaccataccattaccgacacgcttcattgttttttctttttcaattacacgcgccaaaacaagagacgtcaacaaacgaccaaactaaataaaaatcttcatgtcgatgggaaaaaatcacttttcttcctaaaattaagattaaaatgtaagaaaccgctatgtaaatttctggaaaatggtttaaaatactcattttaactcatcaaagtatgcatgtattgactccttacatgatttttcttctccttcacacgtcagtctattttacagatacgatttgttaagtttaaaagttaagttattgacagttaaatcacgtttttttatcagatgacgtataactgaaatcgttgcttgcatctaatgtttacgtgtcatgcacgtgcgtctgtattcggaacagtggaatccaaataaaacatagaggtttcagacttgttattaggaattaatgaatgcttatcagtttatgaataatctgtcaaaaagattagttaattatttttaatgaagtttcttttcttaatctgtatttctttattcataagacttgattctcaaactcaagactttgtttaaaatttttgaatctaattcagttctaaccaattacatattttaaaaaatataaatatttaacattattaatattatttttttcattttagtaaaacatttaaattttattttgtaaccaacgattttaagatgcgttaaaaatattctttattttttatgttaaaagagcaagtaaaaaattatgttttgaaaaaaatgaagaaataaaatggaatgcttaactgcttaagaggtgattaacagaaataacacgaagttaactttataagattattgacaacgagtaaaggacaaatttgggagataaacatgattgaatccgcttagtggtaattttgtggggggcgagaacaagacttattcattgcttaagtaagcgttcctataaaatatagtactcaacaaccttgtatttgttctttgttgaataataaaaccacaaaaacaaaagcccacatgcatgccaattcctcgttgcatcagttctctattgttttggcttcaaagttcagatcatgctttccttttcatttaaggtgagagtctctgaaaatattgtgctgatcttgttttctacttttcttgttttgtatgaggatgttgtgggagggaagtggttttacttttttaccatatagattatagaagtgttggtgctgctcatgttgaagttgaaggagatgctgcatcttgttttatttatcagagaagaaaaaaagttacttttatggaagttattgagcttgtaaaaatgggttgctgattaacttttaacaatggtatgtttaaccgggagcaattacttccaaggttgatccctttctggtttatagtaatgatttttcactttttttgtcttgcttttcagtttaggtttgttgaatcaacagggtgattgatcagaatttctgtgtctcagtgtgtttgaactttgaatgaatttgtatttgaatgcttattttttatttttagtttataattggaagtccctattcacctttctatgtaattgagttgaagtttagagcatgtttaaagaagtttgagttcaagaaaatattaatggatcttatgagtattcctttaaggaattgaaaatcatgaatagcatgtgggaggcatttctgaacgatcctattttttttttacttttttaatgaacaaataaagggaccaaaaaagcaaaaaaaataaaaagaaaaaaaagaggggtctccctttaagtagcagcaagtgctccaaaattcattatctagttatatttatcaagtcaatctccatttcttgattgcatcaaatttgaaagcacaaacaaaaacaataacatgtggaaagtgaaaagctaaagaagagactgattataaaaagattcaaataaaatgataaaattgctgttttgttcggatgttaagaactatattctgttcatgtggattatgaaaatcagactctctttggcgtgctgctagttggaatagcatataataaatctggaaaatataatatgttgtatagtttgtttttctagttttaaaatgcctgcttatgccttcaataaataatccaactctgttcatattggtttctagcctttatttgagtaatatattccatatttcttaactcctgacatcaaagaataccaattttagacaatagcctcaatactacctgcttcttattccatcaggactgagactgcctttttgttttatatggttatagcttctattattttgctatctatgtttgttgcttaaactgtagtgttaccctttctgcagaatatcttagattttgagaacactgctcatgtccagctggaattggagtaaaatgtggacaacgatcacagaccataaatagaagttcctgttgtttgttgttcaaaaaaatagagaaatcagaaaattcaggagtgtttataccagaaaaacattttggtgttgttttcatatattcaaagtaccagttacttatcaaatgcaaatgtctcagaaacataaaatgtcctatgactctagcaggttcggcattgagcctgcgcaaaatctggggtcatgttgcttcctgcaaagtgggaacctagactactactcatcctctgataacggtagccatgcaacctacccttctgtttgtactttcgaacaatattgcaccctggaatcttctacaaacaacaatttcccttccctaaattctccatctactgtcagtttctcacctaacaatagcccagtctcaaagctgcagtcaaaatcaaatgtgttgagttcccagaattcgcttgaaattgttaatgattcgctagaaaacaaatcttgcttgacacttaacgatgatgagctgaggcacaagataagagagcttgaaagtgctatgttgggacatgatacagatattctggatacttatgataccataattccagaagaatctgattcgtttttgaaagaggcagaaaggtggaagagaatgatggaaatgatatctagaggggatttaaaagagatgctttgtacatgtgcaaaagcagtggcaggaaatgatatggagacaactgaatggttgatgtcagagttgcgtaaaatggtctccgtctcaggcaatccaatccaacgattgggagcatacatgttggaggctcttgttgcaaggctggcctcttcaggaagcacaatctacaaagtcttgaaatgtaaagagcctactggtagtgaactcctttcacacatgcatctactttatgaaatctgtccatatctcaaatttggttacatgtcagcaaatggagctattgctgaagccatgaaggaggaaagtgaagtccacattattgattttcagattaaccagggaattcagtgggtaagcctaatccaagctgttgctggcagacctggagcaccccccaagattagaataacaggttttgatgactccacttcagcttatgccagggaaggaggccttgaaattgttggagcaaggttatcaacgcttgctaaatcatataatgtaccctttgagttccatgctatacgagctgctcccactgaggttgaactcaaagaccttgcacttcaacctggtgaagccattgctgtgaactttgccatgatgttgcaccatgttccagatgaatgtgtggatagtcggaaccatcgtgaccggttggtgagattggcaaagtgcttgtctcctaagattgtgacactagttgagcaagaatcacataccaacaacctcccattcttcccccgttttgttgagacaatgaactactacttggctatttttgaatcaattgatgttgctctgccgagggagcacaaagaaaggattaatgtcgagcagcattgtttagctcgagaagttgtcaacttaatagcatgtgaaggggcagaaagagtggaacgtcacgagcttctgaagaagtggagatcacgtttcactatggccggattcacaccatatccgttgaactcctttattacttgttcaataaaaaatcttcagcaaagctaccaaggacattacactctagaagagagagatggggctctatgtcttggttggatgaatcaagttcttattaccacttgtgcttggaggtgatgatccaatgacaactggttcatttttgttatttcagacttttagttagtttatgtatcatcctattcttctttcgcggaattcatagtcaagttactctatagtttgttaaaataacacacttgatttatgttaataatgccagaaccagcaagctcgatctcatcaaagtagacaaaagaaaaaatggcaagcagcactatgtattctatattttgctatgacacgccttacaaagataaaagaataatgacaatttacacctacaaaacatgttagctgaaaattattacaaaacaaggaagaatagaactgggattttttactacaaatttttctaaggtaaactgcatttcttctaacccagttgagtgagacccttcatattcaccatcaacttcatttactgcagttccagcaattatcctgcaaattattgcagcttttttcacattatgtactctggcagtggcagttgttctgtttctcaactctttgtcacttgtattcaagtgaatctcggcatatcgtgtgttgaaattaaactgaattatttgacaaagataacaagatggatctttacacagatcatgaagtttcttatcagatttttcttgcaaacatctcattgtagtaccatagaaccgcaacagttcgttcccatcaactgtgctccttggattccttggattttgctcagaggccaccttcttgacatattctctatacttctcaaacctttctaggacttcttctgagtaactcaccctgaggactgttctaaccttcttcagtggctttgatttgttaaaccaagctttttgaaagatcatctccacaatttttcttgatgggtctccaacactaagctctgccataattttataatgacattaacaagttagtagaacaaaacatatagatagtgaaagaaaggataaaggaagtaagaaagtataaaccaattgctctagctagtttcttcttataagcccgttacattacaaggacttctgaaaaatcataattcttatatttcaaacttctttatcatgacacaccgagttacactgagttttgaagacaaaagcatgatgtgttcatgcaaataggagcagcatgcaacttagtaacttaccatgaagccttcccagtgtgttgcttggtcttgaaaccactaggctagttggagtttccattagaggtctattatatccattcattttctccttttctgcaacatagccacttcctttgccgcattttgtttgctgcttgattacatcgttgagcttgtttccacatttgacattatccttcaaggagacccatatggcatgcatctcttttttcgctcctcttcctccctgtgtggattgaaatatatgagcacaaaaggaatggcttcttgtgaacaagtttgaccttgttgtctcagtaacatgcacaaaattgagggacaaaaaacaaagagtaaatttttgttcactaaactcattttcaattttatacatatagggaaaaaattagtttatttattaaaggtataattgtttttatttcttgctgtctgttgaccaaattgaaatttatgtatatggataaaagattatattttgtttttatgcataattgttttcaatttagtttttatattttacaatgaccgtgtgttaattttactgcattgtaacggcaacaaagaaaataacattaaaagaaattaaaacctcttttggtacaagttttgaattaaaatgcatgtagcattaggacaaaaatatatttcaaccttttctttttccttctgtccgtataggacacagatgatggatctgttttaaaaatgagtgagaaacgtctgctctggaatgcttgagaaaggcaagactacggtggactctccttagtcatttattgttcttttgtcagttttaggcaagcagttctttgatttttagttacaatgtccatatcatatgcctagctaatcaaattttccaaaagcaagattaacttcaccagttcaatcatgaaatatgttcctaacatataattttttgggcttaatcttacgcttgagttatatcattcatacaacactttttacaatatcaattttctctttatttctcttcaccgcagtatttatcttgcatttttcttctattcctacctctatctgttgtataaaaaaattacaaactatttgtacaaatatatataatttctcttttcatttatgaaaaagaaaaagtgatatgctcaagtctaaagacaaaatagaataacatctgtttgcatattggttctgaaaagtcgcttcacatattaaagacacaatcatacagaaacatggttgtggcttttttctttggtataaagagtcatgtcactagcattgctttttccatttatatgataaataataaagcaaacaagagatcaaactttcttttatctctaatttggtgtttatttctttaaaaacaagaaccattcccgttagcataaaaaaatcataatgggttcaagctagatgatgatgatatagtaaggatacagaattgtgctcatggtaaggatcagcccataatccatacatcttgattccataaataggacacaacgtggctgcatgattcttcagtcatggttaagctaagacaaatatatgaatttaagaaagttgtactttacttgcactgcaattaaagaccaacgtgaacatgtcagaattgttcaaagataaagccaagagaatccaatcgtcataaaggatttactcaatcaatattccaagtatggcagtatgtaaatcccaatgccgattgactaatacaagaaattcatcctatatctaagcaaatgtcgtgccaaaatgcaagatgtatatttattgcaaaaatagtgttaaattcattttgctcttccaccaagctagcacgttcagttataacataattattcaattggctccatcacctttcatttgtgtttctctttctagcaaaattcttgaatgcactccaaagtccaaatactactactacgctaaactaatcacaccttgagaagtggcaatgaaatatgacagtggctaaattaatgttattgcaatgtactaggaacatgcaaagaaaaaaaaccccatttttttcttctattcagttttctagaaacaacaagtgcagcacatttgccaatgctgcggtccccctccctaaattacagggtgaaagggaccgtgtccttttgtatgctgaaaccaaaggattgaattgttaatgtctgtgaggacaaggtatatgtacgtataagattataacatccaccgagtttttcgtatgtgaatagagcatagacacatttatctatattcacatccctctcaatcatattattaaaataaaaaataaaaaaatcgtgttaggccatcttgatatgcaatggtaacatcaaatcttctcattaagcaccgcatcttattaagacaatcattgatcacaggtcttaacaaacatcggatacttatttaagcatgtgcttgtttctgtgtggggtcaagatggtaaaataagtatttacaataaaagaagataaatgttaatcagtactatgaggatattgattaaggaacttaaagtaaaaatatttttattgagagataaaaaattatgttattcatgatttttttttactctcttctataatttatacaataaatatttcttccttttaattctttaatcaataccctaagaatactaattaacaagacccacacaaaaggaatgttaatgttgatgaaatgtaaggagcacgaggttacatcatatgtgagacctatttagttaaataaatgatgatagtgaaatttcatttaaaatgtgtaaaaagtagaaaatgaggcgtttaggatgaaaatggccttagagagtccaatctacacaaaacagtgagaatatccaacatgtacaaattcatgatatcatttattcatttagtgcacggtgcacttcaattttcaccatgacaaaacaggtcatcaatcacgggttatgtacgacttgtaaccagtgcagtggggactaaggttttgtggaggtaactttgatatcagcttcatatttatacagaagaatttggatataattataatttataattatacaattacaaacggcaattagatttaaaagtcaagatggagctgctaccaactctactaaacagaagcgctatggaatagtgatataaacataaaagaactatctgcattttcttacagaaaatgagatgttacacatttgaagctatacccgccaaaaataagaaaaaagaaagcaaattgttactcatagttttttatttaatatctgttgtgtaatcaacttcatggacccattagtattcttcccatgctctgtgggtatggatatgaggaacggtttaaagatggaccatcactcctattgtctctagaaacatagggatttgagctgttatttagaacaccaaagtatactggagccgaggtagtatgaacaaacttgaagttggaactgctagtatgagtttgtgtgtccccaaactctgaatgcagcattttcccttgcccatttgacctatgttcagcagctgagctaattcccattccaaggtcaaggctaatggtatcactttcttctaacttagttcttgtctgtccacctgctgcagctgctggtactgccatgtcatggctgctattctttgcagctggtacatcatgattgtgtttaccctcatatgtggttatcactgcttttggatcatgagatgccctctccacatgttttctgacagggcaaccagcatttgtgcatttgtaatagctcctgaataagaagcatagtaagatacaagattaacaaaaaatatgtagttgagtagcatattttagcactgcagcgagttagtatcataagcatggatcattaacatgaaacaagcctcattcatcaaggtcgaagcacacatttgattttaattccaagctttcaagcatttcctgaagtagcgacacactaatataactggaatcatgagaagtaaccttttgagtctgtaattatggcatccacagtaatgattgtcaccacgaaatagaaagcgttagtacatacatttcctaggtgaatatcgccctatttataaataattgttcacaagtgcccaatgacataataaaatgacatcaataagcaggcttagttgtaacattgggatcggctacactagtcattcatgaaaaccagcaggatggtaatcctactttcctaccatcttcataactgagtataaaaattgcaatgatgcctgaatatcttcttgcccttcctcttcaccccaccctaagttttcttataacttcgtattggcttgcaaaattaatattcactcctttcctttggaagcaacatatattccacaatactttcctatatctaataatctactgccactttaatttgccactgtttctttgcaaacttttagaaatcatgcttttaatttccaacttgtatcttaattactaggtatttagtcactctagttcctttttaagatcctccatccccaccagttctcatcaaccttcacccatatgtccatctcagtatcccttaccaaaacaaatctataaagttattccttgtatttcttaattaaacccacaaaagttggtgcttaccaaaaattccctccattttttgcaaatatatatatccttcatgtctgtatatctgaatatactctaatgtaagatacacactgttttttatggaccatgttggctacaaagctgcaacaggggcctcaaagcctcagactatactaaaacccatgataataaaagaaacagattgcaaagcaaaatggttgataagtgaatatatataggcttcaataaattattatatcaagttgattcctcactttaactgttgtctagacatcaagtacaacagaaaaaacttgacattttacaatattaataaaaaagttcatttgacaaagcacattcattaaattggaatttataaattaatttctattcttagtttcatcaacgtgaggacataccttgggttaggattgcctctcacaaccttttggccatacttacgccagcggtacccatcatccaatatgtcaacctcactcaaagtttgtacaacaacccgtggttccctaataggcttaactacaggagtgatgtcaacatttccaagttccatttttctgctcaaaaaaaaaaaaaaaaaaaaaagaaactcagcagcagcaagtgagcacacatgctggagaaaatccagagcttcaaccaaattgtcataccttcgctttgagaagggatcgtcattatcaacctcttcaatagttctgtttgacgcaaacccggcaccctctaaaccatcataatttgttgctacaggtgatgactctggagtactgttgggctcagcagcatgagacacctgaccatacatagtggatgctttgtctacaattcaagaattagaagaaaagaaagccagttattttgtttgcaataagtaataataaaatggaagctaagatagatggctggtattaccatctcggccagccatagaagccttatcagatctctctccttgaatagacataacagtaccagtagagtatcggcagcttggttgaggtttaggatgatcatgtgttcccttgtaaactatctctgtgatttgaccatcatgagagcgctcaaaaagttttttcacttcacagttgggatgtgtacatttgtaataactgcgaggaaattcacttcctttaacaagcttttgcccatattttcgccaattgtatccatcatcagatgttttctcagctgcaactgaaagtccactgcctctaacctcaacatgtgatgcttgaagcccagtagctgtgttgcctttgtggttaatgtcatccaaatcaacatcaacaggatcactagcactagaactaaccttttgtacaggtgatgataggcttaattcattagaaggaactgctatctcactttcaactatgggtgaggaagcaaatgattgagtttttcctggaccttctacttgagtagattgtttacttacatggttgttgaagtctgcaggaaccttaaaacgagtgaatagcattggataagtgctaggcaattagtaatattcaaaacaatattaattagaacatgaaacatgacaacgcaatttgtttccatttaacactttaaccccccaaaaaatatctatttaaaggattataaattataaaactacttaaatgaaacatgactttcggaattgattttgtctaatgcgacaaagtgatgagtaccaacaatcttgacaactttcaaatctgattaattattccatcttgtttagttagtatccagatttaaaccaagtaaagtcacgggagaaagggaaacaaaatccaagccccttcatccatgtgatttgaaagtaatattaatcaaagtgttgccaacatcgattttaattaccatattcgatctattcagtggtttgaattcaaagaaacttgattttctggcatcaacggtattggtattgaagcaggcagaggttactggaaatgtagcagaggaagcagaagccatagaaccatgtactgttggttggagcttacggaaggaccctgtagttggtgaaacctccacctgcaatgcatggacacaaataatatttaaactataatattctttgagcaactgttgttgagtcaaatgaaaaattataaattcaaatgcacaaaaagatactggaaaaaataaattctcaaaaaaacaataaaaagaggggggagggggggaagccaaaacaagcaagttcctgaatacctgcaaaccctaaggcctcaaacagcaatcaatcaacctatgatatcagtaataacagcggaaaaagagtatatatatatatatataatcttatgaataagccaactaattgaacagttttatcagccagtgatgtaagcaacccattataactgagcgtaagcaaagttctccattttctcctgctgatgatattgcatgttgtttatttggagtcagtttgacaaagatagcattgtacattataatatgcaaaagttagttatataaacaatcaatcataacaaagaaaagacactctcacatgaatgtagcacagaattctactcaaattaggaccatccagacgattaacgtctagaaacaagtcccacaaaatctagacccacaatctttctggcattccttatactattctcacagcacaaataacttaaatcaatccactaatcgttgcaatgcattgattcgtttgttccacatatataaatagtaaaggaaaagaagacgacttttcattgcactctgctgcaccgttgaaacaaaaacaaacaaaaagggcaagcaccaacaaaaaagaagattcattatgtgaaaaaacaacactgacactaaaataaataaaatgagaatgtcgagcgatcctaagctaaagttatattccactaaacagaacaccgtatttatttgagcataaagcagccaatacataatcctataagagcaaaagcatcagaacctaacggacccatacacaaatgaactagtaagtgaaggatcaaaatcaaacaagtgaagagccaactctaaagaaacaatgtgccacgagactaaaccagcatataagaatttagaatttcacaaaacaaaaaacagcatcttcagctcattgctcatcagcattcaaatcaagtcattttaagttatcaaattattccaccaaaaaaaaaaaaagatttgacaccaacccagataagccctattgagtagctgagaaaccccaagaaaatcgtagtgaaaagaacaaaactttgatacgccactcacaataagtgacctttaccttacatgggtcaagtaaaaataaaaaacagcaaacaaaacctttgaccaaaatgaactcaaaaacaacaacattcccccaatgaattcactcaagcatttacctttccttcttctaatccatttcctctcagaaaacacaaacccctttgaaaaatgaaaattctccctcataacacaagccattttatttccatttttcaccgaaaccaaaaagatttcaaatgagcacactcacactcaccttcatgttggaaagaagaaccggggattccagaaacgacgtcggactgagccccggaggaatcgtgatgcacggtgacctcgagatcggaagcttcgccggcgacaacagcttgtacctcgccatcgaattctgacccgacccgtttcgattcggatcctcggatgccccagtattttggagcaccgaactggagcggggttcgccggagttggtggcggcgtccattgtgggcggtggcgttgcggagagtcaaaggagaagtagggagggaaggaagggcaaaagggtcatttcaatgatgcattttggtgtgtgttgtgtcagagatgtttgggagagcagagcaggactctcagttgacttgcaacgttggagggatctctttctcacacaactcattcattcatctgtgactctctcttctctgtcattttaaaccctttctaacatttttttttttgttacttcttagtaactaaactcacaccataaaaaaaagtcatcatgatagtaataattgatgttgaatttaaggagttttcatggttggatcggattcattcagattttgaaaatatttttggttctatgtaaaggtaatctttttgacaaatttatttttaaaaaatgaaaatttaaattttgacaaatttatttttaaaaaatgaaaatttaaattttagttcttaagagtgaaaaaatatgataaatacattgattggttaacttttatctattatagttaataaaagagcgtatatgatacgaacaaaaacgtcacaaaaatgattgtttaatatgactattaaatagattggaccaaaatgtcaataaatttttcttagactaatttgttagatcccaaatttcgtttcatttaaggaaaaatataatttaatcttcaattccctcattttttatcgttgcaagcataacattataataaatacttaaaaaaatagaaaaacaaacataataataagcataatattgattaatagtcatgatctatatattactcgaaaatttctaatgtgtcaccttatccaaaatgaaatgattggtacactaacaatttttttgtattgttacaatattttgggtaaggtactgtcacattaaaaatttcatcacaacagacaaattatacttattaatcaatattatgtttattattatgtttgttctaacttatatttgcttccctatttttttaagtgtttattataatgtttattctcgcaatgataaaaaaaaggaggaaaatgaatattaaattatattatacctttaaatgaaatgaaatttgggatcataaattagttcaatgaaaaattattgacattttggtccaatgaaaatttactgaaattttggtccaatctattcaacattcatgttagtaatctttttacgtgacattttatgtctatctatacctatatcacgtaagctctttcattaacggtaacaaatgaaagttaacatatagataaatttgttatacttttttaactttcatggactaaaatttgaatttcatctttcaaggacgaatttgtcagcgctgtatacattcaggaattaaaataactatttagccttaaattaatcctattaaaagtgagtttgtttaaattttaaaaaataactttaaaataaatatttttttatataagtgtttctttaaagaagtagataagatttattttttaaaataagcaaaaaaatatttttaaaaaactaaaacagtgtagacaaacacattaaaaaaacaaaaaagttgtttcttttattaaataaatattcattccaacaaaataagtttaaacaaattggtcctaagattataggagtatattggtttgattcatgtcatgataaaaaaaattattatatttttaactttttgtttttatttattgtttattttatataatttttcaatttttttatcattatataaattttcaatattatattaatatgataatataagatagaaattttctttcttttaataactagtttttttatcaaaaatatcaagaagatttttttttaacaaactttgttattagttgaattttattagaaatcataatattataggagtcttattttttatttaatgaactttactattatgattttcaataaaaatttataaataagataatactattatataattggaaatgaattagagagtgtatttgtaacattccttcttcttttttacttcatttagtatttagtttcttatagttattatattaaatatttcattaatttatttatccaaatatgataaaaaaatcataaaataaatataatcaaattataaggccctcagtaacactagataaaataataagaaagtcaaaataaataaaaaaggaaagaaaaacaaaagtagaataaaaatgaaatactaaaatctaaaatcaattagtttcaaaagttaaagaaagaaagttgataagacgtaggattagtttggattaaaaaaaaatggaaacaaaaccaatcataattgattttgcttatatttaaaatgaaaggaactaattgatcaacaaattcaaactaattatattagtttggtttggatttttagatttttcaagtcaagatgatttcataatacccatattgaattgtttgtagcttaatacacatgcatggatcattattattcaaaaattattattaatataagagtaaataagatatacatcaataatataaaaaaaatcatattatcattcgattataatcttgtaagtgtaaaaagttattattttacaataatcaacttaaaaatcatattaacaataatttcttattaattgataatataaaaaaatttacattaatggtacatacaaattaaactcttaaaataattattataaaaattaatacatgtaagtaatttgttgataatataaaaaaaaatacagtatatattatttattctttgtttggaaaaaattaaggcgtgaacggatgggatggagagagaaaataatcggttgtgtagatttaacttttagactttttaaagctgataggtggatgattttgtcaatgaatgattcactattggacaaagattttgtaacaaaatgattattttactattcgttaaaagaattattattttttgtgtttgatgtgtgttttggctaggtaagagttgaaagtgaaaagtggtgtgccaagtaccaactctatgttactcttcaccatacacaatcaatatgagtgattggtgcaaaactgcggttccctttccacaagttgaaagccaaagccaaaccagaattggttcagcaaagggttagattcaaataatttaatctcatgaataggagagtcaggctcaagcaatgacctcagtgtgtagttttgtctatgttatttgaactttgatcacatgattcaattcaaggaatgctctgtcggcaattcccatggggaaaattagcaagtggatgtagcgaagagaactggattaaaccataattagttcacagaatcatgttgtgtttgaggtttttggacaatactacctggtttagggcatctaaatgtggcaattgttgacctgaccaattaattccatttgggtttgctgattttaaaaaaaaatccatttgggtatttttcagtcacaacaataaatgagaatgttgtcaaattttcatggatatgctgtaaagatctaagaaagaataagttaacatgttggcctcacactattaaatatcttctttactaatctcataccattttactaaaaggggttaaaaagaagttaaggctcaatttttggtttactactataatgtatagagtattattaatgaaatatggtctagaaaagcacaagagatagaaacatttcattatagtttgttttcttttctccattcggtgtgtgtttttactttttacctgtgtggagacagataagaaaaggaagggtgtacttagcctataattaggtgaagagataggaaaacaacgacaaatctaagcatttaacggcttgagatgcagttaaagcaaaggtctcactggttttctaattccttacaatttttttatagagtaatatatttcctccctaatgaattttactatattaaatgttaaagcatgccacattcaattcaattgcatatcagagcatgctatccaaaaataaaatcacctaccttatctatctctctcaacattttttcttatttgctgacaaaatttcccagataaaactaaagtatgaatcccttatttataacgtagacagtagaaacagttaagagttgttaatttcattggcattcctctcaccatcttaccgaccatctatttatccaataattttttgccactttacaaactttggaaatggctgagtgcatttgctttctcgaatttatttaatgaatgaaatttgaaaactgtcgcaaaaataaaattatgtatagaaagagagattttatcacattaagagttcgttaagtatcttcagaatttcatgtgaaaatcttagaggtgaattttggataaaatagtttaaaggataaagaaaactcattcttaagatttttaacaatgggataccaaactaatttttaaatttcagaatgtggagaagaaactctacttttttttaaaaggaaaggtactcaatcataaaaagcctgtttgttaatacttttattaatatgatcccttaagtatgctcagtgctcacagaggtttggatcttaataatgtgtacggaattttttttattagatgagatagagcctatttcaattatctctatattttaaaagggactaattttcaactattagttaaaaatactcttaataacagtatctcttactgtattcagtccatcattcttaattttttataaagaagtctatcattattgttaatgaaatgatatgattctgcttttggtcaatatatatatataaaggagcattgaataaaattttattaaaccccaataatattaaattttttcttatttttaataaattgcatattttattgttgattcccttaaaatttaatgtatgaaaagttcctattgatatcattcaaaaccgaaggtgaataataaaatattgatgaatcatatattaaaaattaccaaaaactgaatagatacccatcttacgattgataaattgcttctagttgttttgtcttgtattgacaaataaattacctctatttgttttgaattttcttatcttttcggcaatgagaataataaaaacaagaacgtgtataacgaggtaggaaaaacttcctcacaaaaatagaggattacttaaattaaaaatccagagaaaattcatttcatgaaataataacgttgaacagctaaaacaacttatacagaaaactatgtatttataattttctagtattcaacgcttccaatttactaaaacatgttgtctaaatttttttactaaaacataagaatgaattaagtttatttaatatttctgcatatattctataattaagttttctttgacaaatatttaaatcaatcaaattccacttttcaatctgtgctcactaatatgaaaatcttgactccgcatagtgtatttcccactaatgttaaatcttgtaaaactactcatgtcccgttgataaaaaccataacacagacttcaataatatattcactaatattctttgccaaattcaaacttctatgcttaaagctagtcgtccagggtgagttacaccttgttagggatgcaaagtccatttcctctgaatgaaattctcactattcactaaccaaaaaagaagaaagctggccagtcatctacggcccattttcatggaacacactgagaatacgtctcaaccatcagtgtagtaaacatttccaaacatatagaaaacgaggtctcttacatgttacattaccaattagcaatgatctcaaaaggtgagaggaacaatctatacaacaccaaataataatacagacacatcttttcttaggtaatagatcacttcataggtagaacagtgtaaaaatcctctcatacacttacccttctttagtgttaactattctacggtaaaactcaagctaatgcacattgacagagctaatgacgtccaggaaacttaaagatcaaaatactgtacgtacagaaacatgtatcacaaaatcagctggtgctaaaattgttaagagaacctccctagtagtgtgtgtataatcgaagtgtcaaaactcattttctcaagctaatcttattccaccaacattatgttggttcgaatgtaattgagtttctttaagtaaaatcttgaattttgaacttgagaatgaaaatgaacataattggaaaggaatatcttttattaaagatggtcgtcaatttttttataaaaattaattattaacaaagttgatagatactttacacttacaacatagtaaataaaaaaatgttaatcttaatattgttttttatcattagctaatcttaatctcaccagcctcaatgtgattatttctttatattctttttttttttggaaaaaaaaaatagagcgggaaaatggttgctgaaatccagattcaggataggcccacgcagggcactcacaaataacccaccataaggagacctgggattcaaacttaagccacgtgtttgtcatggacttagtgcgatcaagggagccaactcccgtaggcaaatttcttaattttctatgattgacagtactgaactttttacccacttcatgatttaaatgatgcaaaatctatagactaaaaaatctcagacagcccaaaagtttattttcctacaagggtttaacttcctacacccaacaaatttctaatacacccagcacttatttgtgaaataccataaatatccttcttgattactttaataaaacaaaagcattcaaaggtgatttgatttttctaatacacccagcacttatctgtgttttcgcggctcttctccttctccttcaaacctgcgattttgattctccggcgcattcaatggtgtgcggttcttgtctgtggctgtggacggagctggtggtggtcggcaaagctgttctggtttccggcgcgacgaggtaagtgacctttggctcggagtcgtttgagttttggatgcgtacagatctcgaatccgtaagctgtacagtatacggattacagatccgtattaaggaatgtgagccccgttgccttacggatcaccaatccgtagagtccttacggattgccaatccgtgggatcattacggattgccaatccgtgggagcctcacggattgccaatccgtaggagcctcacggattggcgatccgtaaggaccccacggattggcgatccgtaaggctcccacggattggcgatccgtaaggaccctacggattgccaatccgtgggagccttatggattgccaatccgtaggggtatttgcttaaatttttttaaaaaatgaatgaacttaactgctttaatgaattgctatgtgtttggtatggttgaatgattcgtaaagtatgttgtgtaatggtatggacttgttagattattttttatcctcgacatgtgtatggtttgatcgatggctagataatgtgtaatattatgagtaaaatgaactctttaaatgaattgttatgtgaaaagcttgttgtctaatggtatggacatgctacattggttttgatctcgacatgcatactatggtttgatccacatttgttacgttatttgaaatgtgatgagcaaattgaactgttttaataaattgaactgtgaaaaacatgttgtgtaatggtatggacatgctacattggttttgatcctcgacatgcatactatggtttgatccacatttgttaggttatttgaaatgtgatgaggaaattgaactattttaataaattgaactgtgaaaaccatgttgtgtaatggtatggacttgctacattggttttgatcgtcgacatgcttactatggtttgatccacatttgttaggttatttgaaatgtgatgaggaaattgaactgttttaataaattgaactgtgaaaaccatgttgtgtaatggtatggacttgctacattggttttgatcgtcgacatgcttactatggtttgatccacatgtgaagtacatgttgtctaatcgtatggagctggtagttggtttttaatctacttgttaggtttcgttatctgaaaggattatgcttatccaaatgggtatgtttgtaatgtaactacttggtttcaatgtcagattatggctaagacgataggattacggtgggctttggcaagagatgccagtgaagaagaacccgctgtacggcgaagaccgacagcatcagcacggagacaacgccagaggactggtgttgttgaggacgtgcctgctgaggtagacgctgacgatgttgaccatggtgcacctgttgaggctgaggtcgagggaagcatcgatgcctctgatgttgacggatttcccggtgggccccaggacacttcagtgttgagtcattacgatgaacatattgcacctaggatttggaggggggaggtatgattgtatttaaacatagttgaatttgataattattttcgcgttagggtatgtgtatgtaactaacaactaatacaggaactgccggagcttaagttggcatctcatgggaggaaggtgcataaatttggccggcctgcgcctgagattgaagggttggtggcaggtacaagattaagcccactgatcacctgttcggtagatacaggtgaccggggtttaatctcggcatttgtggagaggtggcataaggagactagcagtttccatttgccgatcggagagatgacgatcacgctggacgacgtcgcgtgtctatttcatctaccggtgatgggtgggctgcagacgtacgatgtgttggacgttgatgaggcgattgcgttactagtagatttgcttgaggttacccatgaccaggctgcagcagagacgaaacagtgccatggaccttatgttcgtctgtcatggttgcgggagttatatgatgagaggtgtcagcagatgcagtggacggtggcagccagagcttatttgctccacttggttggttgcacgatttttgctaacaagagtgccacacatattggtgtggtattcttggagccatttcgtgatctccaccagtctggcgggttcaattggggggcggctgcactccaacacatgtacgataacttgaactacgcctgtcagcatcatggtaaacatcttgctggttatattagtctgcttcaggtaaattttttttatataagttaaaatttgttatttgtttaatgtgaaagtgaatttcaactgcttatttgtgtttggttgtttttgttacttaagtgttgggtatacgagtactttccaagtgttggcagcatgattgcggataaggactatgtagagagccagccacgggcatgtcgctggaagccggggaaggcgttacctgtcagttcctatcggaggcgactagataggttgacgaccgacgctgtctgttggactccatacatcgatcatcgtccggtccgtccctttgaggtcatctgtctctactcaggttatatttgatggggtccttactgtgtcaggtaccttccagagagggtactcagacagtttggcttcattcagaccatccccattctcctgagcttgcccaccccgtcagatgaagaggtggatgacagctggcttcattacgcccaccatcttactatcacaggacccccttcccccggccagtgcgaggctgcatacatggactggttctaccggatatcacaccctttcatgtgcccgcctaagcctggggaagacagagcgcctcctcatgtgccagttaccacagatgatccaccatctactacggcagaccccacgggtgacattgcagctgatcagcctgacatgcctcgacatgcaatggtaacacaaatttgtaatttattctcgtattaaaaaatgtttaacctgtgttatgattataacgaccgcttacacagtttgtctaatttttattgcaggccgcattcgaaaccattgcagagaggttgcagaggcttatagatcttcgcatggtgacctctggcaccgatgtgtacgagactgttgccaactgtgttacattagcacgcagtgtctgcgatgatcggagagtgtatgttcgctcgagacgtcgtaggactggaccgcgtggagattgatttgttactttttttgtattgttgacaacatatgtattaacattattgtattgttgaaacatttcatttcatatatgtaaatgctttttaacattatccatctgcgacagtattttgtcatgcgaaataacagaatccagcagttaatacaattacataaccccctgccatttagttcacaacacatgaaaacattacgtaaagtcaaagcatgtcagaacccagatcaacataaactggtggcaatgttgtcaagcttgtatacttcttcagtcgactaatgtaactagatggccactcatttgcttgaggctgacaatgtcttgaccataataatgcaattggtggcataggacagccatctcgcaatgcaacctgaacacaaaccgttttattgttaatgtacacaagtcaaatgattagaaacacataaaacgacattagttgtacctgaacaaaatggtttccatatacatgaccgatacaaatgacgcgatgtcccgcaggatctctaggcggttggcttctaagcgggaaaaaagtcatactttgttgcttagaaagacaaacaagaactaggttataacgtgaagcaattacataacccatgtctgtaacatccatccatttatcctgtgttacctgcattttaacaaagtataagtgttatgcaccacaacaatatggtaatattgtcaatcacagacacaagtcacatttaccattgagaatccgtccacaagtagtgatctttttaagtcctcaaatctttgtaacccaccaaacaatataatatagtctgcagaccattcgttaagttccttaagcaaattgttacgaaccacaggccacccatcttcaccaaaacccagtagagccgcaataacccgatatccacaattaccatcggctttaacatcacatacaccaataatgtaatttctcatgcacggaaggaactgatccagcattggaatatcacccatcggtgaagcacctgaagatgttgaagcggactgtggtacagaggagcaactatcatgttgagaatgtaatgcgtcgacgtactcaaagtacgatggatctcgctttgttgatctttgatacttggtaaggtttttcttttgagccccttttgtcttcaccttttcaggaggaggacacattgatgtttgatcaggatacgcaatttctttcaatttagtcttaagagtaactttgccacacaagtcaagactttcaaatcgcttggatatcacttcccactcttctgtgatggtcacctccatctcatcaactgatgagtccgacatatgcaatctccgccaaaacatgtgtaccgtgcccagtggtatgctgctaacattatactttgctaactcacatgcacaaggcaaaccatgcgtacttcttaacacacatccacaacgacaactatctacacctacatgcttaactcggtctaactctgcggcaatttcatttaacgcatacctggaaaccatgcctacgagtcttttgtataacgtggttttaaacatatgtccaacaacatgtgtgcttgtctcaaaagaagccttaatctcattgtgttgtaacgtgatcatgttgttcatcgcatcctatacgttacacaaatctccaagactgtcctgcagtagtctctttaaggtccaatgggcagacttaaccctgtagtaaacggttaaaataacaccggttaactaaatgatgaccatgcagtataatgtaattgtaaactttctattgtaaagcatttacctgttcgtagtggtgtggccaaaatgcatcactttattagtccaggctgtgacaaatcgttctttgtgagggatcaaccacgtgtctttcacatattgaacaaatattggccatggtgcacaaacacattcaaacctcatcagacactcatcccattcattttcaaaagcacaatctaccagacttccccatgcttccatgacaaactcccatgaattgttttgtcccacgagcgttttacatttttccttgacattcttgtcaatgtggaaccgacacaacaagttcattgtgccagggaaaacatctttgatcgcattcatgagggctgtatctctgtctgtcacaatgacatcaggaaaaaattcagtcttcaaaaaaagccctctaaatcgttcaagagcccatacaagattgttcgtacgttcgccctccaaatatgcaaaggcagctgaaaaagtcatcccggtaggtgtcactccgactatgtcaaccaaagggagtctatacctatttgttttgtatgtactatcaattaggaaaaccaaatgatatgaatttatcaacttgactgcatccggatgtgcccaaaacatgtctcggataacattttcttccttcactctatgccagtggacatacatatcacgatgaagaagcttcattaaatgttgcatttcagtattgttgcctcttatagaagtgcggtatgcatatcttgcattgtacacttgtttcattgttgtataacttttaggattgcgatcttttaaagtgagcataatatttttgggtttaacccttgagtttgtcatatcaccaacaattaccttctcttcctcagttaaacgaccagcatatggatgtccagtgaatgacttagccaaacaatggttgtgtaacccgcagattaactttaccatccacccttcaccacctatgacgggtttccctcgcaacttaaaaggacacccgcattttctactgctagtggtcatgcgttctaaatctttgttgaatgctctatactttccactcctttcacaacctatcaaaataaatgtggtccttcccctcttaccagttgttgtgtcagacctcattatcacagctacaaaaccaatctcatgtgcaacactacgagcccattgcaatacctcgtcacgagaattaaacacctacaacatttcagaatacatgctcaatctcatgaaattatttatttactgacattcaatatgctactttatcacataaatacctttgaagtcttaaatgcatcagaacaatcaatcacagaattctcattctcaaatgcaaacggttcacctctattgtcttcacccatattattttcttccgccataatatcatcatgcatccaatcatcgttatccatcttaataaacaaacaaattcaaaacaaataatcattaacaaaaaatatggttatattcatttcacaactttgtgattaattcaaaacaaattttcctcataattcaaaagttaatggttattttaattcaaagaggaaaaatacaataattattaattccttttaacaaaaacaactcaaaataacaaaaaaaaaacccaaaatcaaaacaaacagaaaaaaaagccatacggattggcaatccgtaggagtcacacggattggcaatccgtaggagtcacacggattgccaatccgtgtgactcctacgaattgccaatccgtatggtttctgctacaatgattagttgcagaacgtacttccgacgacggcagcggccaatggaagctccaccaatgctaaccacgacctcccgaaccaaaccaaccacgcaagaggcaccaacacgcagccaacaaccaacagtgaagacgcgaagaagcagaaggcgcatggaagaagaaaatgaagaaaaaacctgctgggtgtatgttaaaaagcaacaagggtagtattgccattttttaaaaattgctgggtgtattagaaattagctgggtgtaggaagttaaacccttcctacaatgtgtgtcacataccttggattagcccaaggtgataggaacccaaacatattgttttgggctgcttcataaaaagagacttcaactaccatagaccaaagcatacataccatgattcaaccgaatatcactaccatgatgacatttaacatcaattcatccacatctacttatgatactcaactaaactgctagtaacacaaaggaaagaaaataaaccagagatgagaaactgatctgaataccagacctagttgaaaggtatttttcaacatgagaacaaagacagttcatacagggaagtaacaaaataacaaaacaaatatcttgtattttttcatctgtggggatgatgcctggtctcatggatgagaacaatcaatacaattctcctagactttatgttaaagcttacggaatggatggattaccctacgtttttggattaaaatcctcgaaaacaatggatgagaaaagcgagtttctatctacagtgagaggcaaccaaacaaaagttaaaatccagagaccagggagagttgttgtctgggatgtcataatactaaatactttcaatcccattattaaattttgataaggttaacccataatttcctttaaatatgatttctgtttttcttttactattatgaactaggacatgaaagaaaagaaatcaagcacacatgaaactgtagtgtagacacgtttaataagttattctcaagcaaaactgcacctgatacagtgacacaaatatggaagtttctatttgagatggttttacctttgaaacccaatctaagcctcaataccaaacaaagaaaataaaggtaggcatgaatgaagagcaagaacagaaaagtttaaggaataccgtgaataacctaaaaggaaacttgtagatgtaaaatcattcaagtaattaaaaattgtgaaactaatcattccctcacaatccttcattgctgaatctatggttcctttcctttaatcatggagatcaacaaagcaagctatgcttttaataactaaaagccagaagtgcaaagtcatagagaaactaataccaagccaccaacccaggagttcagttttcaaaagaaaacgaaatctcaatctactgaggataagatgtttggtaataatgttgctgaccataaccaccataagcagagccactatcataataaccagaaggcataagtggttctgatgaatttggaagagaacaaccttgaccaaggttgccactgggacccattgggacaccatcaggaccataaggcccagttgaagcgcctgcattaggcaagatggatattcagattgaagattactacactcaataaccttaattgccgatttcagtgcatggatttgtctcgccatgatctcactctgcaaaaacacccaaataaatacaggcagtgacaccatagaccaggtaaccaatcaagcggaggatacttacaagtgacttcccttcttcggaaagtcttttaacagtttctgagactcattcacgtgagctttcaaaatgggaaccggtggaatcttatgagcaagattgaactcaaaaacaaacttgacagccaaaatatgtttgctcctgtcaataactttctgcacaagacatgcgtaacacccaaaacaaaatttccctcacaaattaaaccaccaaaaagtgtaacactagaaatcaaataacagcagcatcaccatttcaaattacaaccttgcaccatttttgttattaaaaaaaattccaactccagaccacgcaacataaacactaggggcttaatgatgtttaagaccctgaaaaatggacatcattagtttttgtccgtgactttcaaaaccattagtttccgtccatgtgtttttttaaatatccaaactttaatcctctaaagctaaaattgcaagggactaaaatattatgatattaggggataaagtttggatatttggcaaaacatacggacgaaaaattatgattttaaaagtcgccaccctaaaaccaaagatccatttttgatggaatggaaacaccataaaccctaaacactactgtaacaacaacagttaagaaactacaagtacaacaaaacaaaaacacaaatactgtaacacaataccatctcctaccagctcaaataaagcaaaaaatcaaattcaattaagggattgcaacctggaactaaaaccaaagatggccctcacagacttaaaacaccattaaccaggggtgtaaatgaaccaaattattcatgaactattcgagtttgactcatcaattaatcgttcaaacttgtttgattaattaaaataaacaaactcgagcttgatattaagcttgaatatttaaatgagtcaagcccaaattttaaaagcttaatattgatattaagggctcgtgaatagctagtttatatatatatatatatatatatatatatatatatatatataagttttatttaatcttatactagtatttatttatgatagattgataattttcattaaaaatttatttacttttataatttttgagttaaattagaaaatataagataagattaaaaagcaaatgacgtttcaattgctttgagctttcccacttacttttcttttgcattgtaactcaaaattttgaagactcttcctttgccaaatcaagtttttcatcttcaaagcttttctcccaaattaaaattccaagattataaatgagtcaaaaaaaacataactgaatgcttctcatagtaaaaaaaaattctaccgaaatcgaaagtaaaaaaaaaaatgtttcaaaggattttttcagtttccacatacaaagaagcttttcgtggaaataaaaattattttctagaaacatgttgtagtaaaattccaaatccttttcattaaaaaatggataattgtaccaaataacaatattaatcactgtaaaaataaaaataaagcaatggaaaattaacatacttgaagttgattggtgtcttgcatgagaggggtccgtcatatttgaatagttgaatactagaatagaatgtgaaacaatgagtgaaggaatttgaagcacctgagattgaatttgaaagtgatgtagaagagtggtccactggcccggtagaaagtgaagtggaatttgaagcacctgaaattgcattgtaactcatttaacaagccaagcccaagattataaatgaatcaagctttagccattaatttttttcaatgatcaaacccaaaattcaagagctcaattcaactcgtctcatttacacccctaccattaaccctaaacactagtgtaacaattcataacaacagttaacaagctacaacaacaaaacaaaaataaagtcacgtcataatatcatttcttaccagctccaatccaaaattctgttttaattcatttcggataaatagtcaaattcgtcttcgaaaatatgatgtggtgacaaattaatacctaaaaaatgaaaaatgaaaaatttaaatttaattcctaaatgtgtaaaaagtaccaacaaattaatcatttcataagcgtgatgttatttgatgttatctcatgaaaaattagacttattgagcttgtttcgttccaagttaaacaaatcctattacagatataggatattagtattactagggttgactatataacctacatttgtactcatgtaataatttttcttatttgagtaaaatatacttttctctcttttctccccctgacccatgaattctaacaagcccttatcactccgatcgggatagacgggtccttgagctatttttttagtgaagggtgttaatgaaaatctttaagtaaaatagtctgtgaattgataatcaaatggagtcattacaaacatacgtctattagaatacgagacaaaaagaatcggaggggataaaataaaaaatgagaacatttgatcacggtaaaaaatcataaaaaaattataaaaattaaaaacgaatgttgatataattacaagataaaaaatatattcaaacctttggacaaaatctaagaagataatgtttttttttcttctctaattcaaaacttactttttttagtcacagtaccaaactcacaactcctactttaaccaagcacatttaagcaacgacctgcaaaaacaatagtaatagtatctgaattaaatatgtgttccagcttaggggtgttattggattaacttaaaaatggtttggatcaaatctaatttaattcaattaagatatgattataaatggattggattgtgagttttattttttattcgatccaatccaattcatatcatacattttatttattattatatgtaaattaattattaaatataaaatacattaatttttaactcataatttattaattattaaattaaaaaatccatatttttttctttttaagttattatttttatctctatcttgattttatttatattttcttatgttaatataaaactttatttatatctaaaataaaaatatcatattaacatatatttagtagttatatatttataaaattttagataaaaataaattattattctaaaaaaatatttttttacaaaatatatatatatatatatatattcaaatatttagactcgattaatctttgaatagattgatttgaatcgaatttataaaaataattgttaaaactcaatttaatttgcaaaattttcatcagattatataatgaatttaatccaatcagattaaatcctatccgtaaacaccctatcgaaccataaaataagattagatacgctgttggttttttaaataaagaacaaagggcaaaaaatgcatggactgatgaaagcgtaagtgagagagaggaattggttttgaatttcaattttgaaggtatagtctatagtctatagtggaaggctgaatcaggaaggaacttatcctactagtgctgtctgtcaacgttactcacttcagaagcattatataatagaatgagccaaacaacaacgaaaacgcgttcacttcaaagttttattttaaaattaatattattaaaggaagggtacaaccaagacgcgttcaatacccattctattctatttctgctccctccatacttttccttactccactgcctattatttaaattacatagctcttagagtggaacaagtttaacgggtaataaccatttttaatcatcattgattttccactttcaattttacaatattaactataactattctttcccttaaataattcccaataaaaaggaaatgaactaacttgtaaagctttcatagaatgaaatacaattaatagcagttacttgcaaagaaggaagtcaagtgtcttgttttaacaaaatttaactaccttttaatttatttaattaaaattattttaactggactatactttatttaattaaattagttatgtttggtaaatattattttactaacttataatatttttgaaatgttttttgaatttgcgtttgaactcagtttttttaccttcaatattttaagaaacattttcatttatcactttttttaatgttatattattttttttaacaaaaaatagtttttaataccacattatttatttttattataacagaatttgactttcaaacaaaaagtaaatgcttaaaattaattaaaaaacaaaattctaattatctaaaaatatattttgtctactaaataaaaaattatataaatatactatttgatgtcagataatttgattatcaaatacagccattatattgtacaagatcctttaattcatataaatattgaatggctgattaaaaaaaaatcaatgataagtgaatagtcatgacatggacaacacaattcatgaacatactctttaattcattaactttcttgcaataatataattgtgtggtatgtatatataccttacgtgtttagattttaaagattctttttgttttttaaacagattttaaagattctgcatgtgcaaatattaaaaagactgtatgagataaatgtgaggtgcaatgatcttctatgaaaatggtcactttaaaaatgattgtgttcgcgcctaaaacacacactctttgcatcttcttcaaaccttataggctttatcgcccattataactctgcatattcatatccatgattactaaaatgaagttcgttgtatgcaaagattttgagctagctgcatttgaagatggattctactattctagttctagggtgaagtggcattaatttttatcattagatatataactaaaatattgggctgagattcaagaaaggaaactcacttaatcggttattttctaattacatttgaatgttttataacaattactttatttttctttatgtggtcaacttcctgccacccacagcccaccgccaccaccacctccttccagcactcacaatatgcaattcattccaaatttagtttccgtaaatgcgataagttattaaattcataaaattattttgtaattaattatattatttaagtatttatttgataataaattatattttaaaacattaatttgatattaaattataaaatttagatattaatttattattaaattatctaaagaattaatttctcacatttttatacatttaggagttaatttaaatttttatcttttaagattaatttgtcattctttcacattttcatagacaaaattaattatttatcaaaaaataataatatttttaaccaaaaacaattaaaagtttacccgttaatgaagttgcttttctctgacctctcgaccataatgtgaaaaaaacaacaaatagatcggtgttattattaaatttgtgaaaatattttattattaaatgataacaaagattaatttaataataaattttatttttaagttcactttaatattatattacaaaattaaagaatcaatttatcattaaattattcacgtaattaatctttcaaacattttattttaaaactaaatttaaatttacttttttaatgcctaatttattatgtctcataaccaaaataaaatattttaaaaataaaaagacctcagccattcaattttttaccactcacattggaagaagccgccgactttgaccaaagagaagaatgagaagaaaagtcacactttcctcccttcttcctttagctttcccgttgctgctgtgctgtgctgtgctgacaataaaaagggccacccctttctccctcttcttcattcttcgctcaatcgaggtcttctcgatttccttttctacaacacaacgctctcttctcttgcaaccaaaatacttgttccagtgtctactctactcaaaaaggtatgtctttctttccgtgcttttactgactcatacatatatatttttttttgttgggtgttcttgtttagatctttggttgttttgggtgggtctgaggaatatgcttcgtgggtctgcttctgggtagattaaagtttcaaactttggttttatattttggcagttgcatgttttcgccccgacccacctttcttccttttagttccttattaagtttattggaataccaagttgttgttgtcttggataggattagttatggatctaacctttgttggtaaaattggtattaacacgttttatggggacgttgcttagctttgtatctgtagggatttgaactagggtttggaaactctgtttctaaatttgaggttttatcgtttttctttattctgtgtgaataataaattataaattgaaaggcttattgagattacgttgtcttattctgcaggttttgggacatcatgtgcagtgattcgaaaagtaaactttcttccccaaccctagtcgtcatggagagtagtaacattcagaagcagaatctggatggtctctacaactcggttttgcttgaattgtctgcatctgatgattatgaggctttcaaaagagaggtggatgaaaagggcttagatgtgaacgaggcaggcttatggtatggtagaagaattgggtcaaagaagatgggatctgaaacgaggacccctctgatgattgcttctttgtttggaagcgctaaggtgctcaattatattcttcttgagaaaggaggaggtgttgatgtgaacagggtctgtggttctgatagggccactgctctccattgtgctgttgctggtggctccgaatcctcacttgagattgtcaagctcttgcttgatgctggggctgatgctgagtgccttgatgcgagtggcaacaagccggttaatctgattgctcctgcctttgattctttgtccaaatcgcgaaggaaggctatggagatgttcctcaggggtggtggggaaagagatgaactcatgaaccaggagatggagttacagatgttttctgttccagagaaaaaagaaggaagtgataataagaaagaataccctgttgatatatcactgcctgacatcaacaacggtgtatatggaacagatgagtttaggatgtacaacttcaaggtgaagccttgctcaagggcttactcccatgactggaccgagtgtccattcgttcatcccggggagaacgcgaggaggagagacccacggaaatacccttacagctgtgttccttgcccagagttccgcaaagggacctgccagaagggtgattcctgcgagtatgctcatggtgtttttgagtcctggctacatcccgcccaataccggacaaggctttgcaaggatgagacgggctgtgctagaaaagtctgcttctttgctcacaaacctgaagaactacgccctgtgtatgcttccactgggtcggctatgccatcaccaaaatcctattcagctagtggacttgacatgacagctatgagtccattggctcttagttccacatctttgccgatgccaagtgtttcaaccccacccatgtctcccttggcagtagcttcatctcccaagagtggaagcttgtggcagaacaaaataaaccttactccaccatcgttgcagctccctggtagccgactgaaggctgctttgagtgccagggatctggagatggagatggaactgctcggtctagaaagccctgctcgccaacaacagcagcagcaacaacaattgatcgaagaaattgccaggatctcttccccatcttttcggagccaggaattcaacaggattgttgatttgaatcctactaaccttgatgacctgttagcatctgctgacccttctgtattatctcaattacatggactttctgtgcaaccttcaacacccacacaaagtgggcttcagatgcgccaaaacatgaaccacctccgtgcgagttatccatccaacatcccttcctctcctctgaggaagccctcagcttttgggtttgactcatcagctgctgtggcaactgcaatgatgaattccaggtccgctgccttcgcaaaacgaagccaaagtttcattgaccgtggagctgcaacccaccatcttgggctgtcttcagcttccaacccttcttgcagggtctcctctaccctttcagattggagttcccctactgggaaactggattggggtgtaaacggagacaagctgaacaagctgaggaaatctacttcctttgggttcagaaacagtggggtaactgcatcccccatagcacagccagaatttggtgctgagccggatgtctcatgggttcattcattggttaaagatgttccctccgagaggtctgagatatttggtgctgagaaccaacaatatgatctcagtaaagagatgctttcaccatgggtggagcagctgtatatagagcaggagcagatggtagcatgagcaagggctgccatggcaatgcttcttggttattctgacaaagtttatttatttatttaattattttattcatttgaaatgcttctactatccaatattacaaaatatagttagggataggatgagatatgttgcaaagaacaaagttcaggttaatccagagatttgaacgggagttccaacttctagaagatcagggaagacttggagaaacgttgaacgaaggatgctgaatttttatattgtataatataaatttataacccccatttctctacggatggatgtattttctctagcaagtggaccccaaagtagttgtcattgattaagcagcacaattctttttttatataaaattgttatgccatttgatcaatgcttatccattactagaagtagtttcaagggaatttcttgtgtgtctgtttattgcctattctttcttatttaaatacttgattccttgtggtttaatggattcaaattcttcaaatataaatcgtgttcttatttagttttgattatattgagcttgtaggatctgtatcctcacggttttcccccctcaggccacacagagatctgtttttctcggcataatattcttcgtttgagattttttttttcctctttatgttcttgacggtttttttttaaagaggagttttaacacatttgtctctttcaatttctcccccttaaatacaaagagaggtcagccttttttgggtccagtaataacctgttctccccgccccccaaccagaacacaaataattaaaacatgatggcttctttcctgttgggagtttaaggaaaaaactagaagtaaacttacaaaatatgagctgacttgtattcttcctattttttttaaaaaaaatattctaaagaaactccagaagatcacttaatataaagaactttgaatgctgttttgttctttttttcccgaagggaaaaattcatagaaagcctcacaagtaaagagaataaaaaaagattgaaacacactgtaaaagatcaaacttacacacaatttcatgtcccgcaacttaatcaactgaggttactaaaggagagtattagatacttgataggtatggagttgagaatgagtttcaaatatttattgatttcttattttataataaatttttaaaggtccatcgatgaacagctgacaaaatgtttgaaaaaccattttcaatgttacatctaagggtaccaaaggaaaatagagtatgtcactttaattggttacagtagtactatcaaatattttagaaaaaacaggtcatggctaacccttcctttctggagcattagttggcacttgcaagttggaatgcaataggtaaaaaaagtatattcttaactgtaaaatttcttatgtatctcttaaattgcaataattttttcagccgttggttcaagaaaaaatttgtatattgtggaaatcaaacataagatttctatttaaataaatcgtttcctcacatttgaatacagctgagtcctacgcctttgtcaatcttgtggtttacatgtattccataggtgcaaaaaattgcaattatctgtacagataagatacaggttttataaaggtgtcgacgacggctcaataagaaaaggaaagagggttggaaaaaataaatggtgtgaaataagtctgcttcagatttattttaaaaaaattatgtataaaaagcactcccatttataaatataatacaagactttatttatgtatgccattatagatagatagattcaactttgaaatgaaggcaatgtcgggaaatgtagttatccagattagagggttatgtggcgaacagacggtccaatggtccttataggtagttgagtccttcagagaatgagttggtcttggtttagagtttgtttgttagttcatcaacccacgtgcttaaatttgtcaaggataatgtttagggcacattagcaaaataggcaaaaaaaaataaaaatgtatgaagtacattttgtataaatttgatatgatataaacgctgacatgatcggcataaagtacacacgttatgtataatcgttaaattttatgcaaatttgtgctgcaagatattaatataaaatcaagagatagtaaataattgaatatgctcctatcgtcacaatttgtgttatcttctaaactgaacttatttcaggaagtataatggcaaatgaacgaaaattgtataaataaaaacatgccgcacaattaaatttaaacttcaataacaaatgtgaagttaacttacataaatctagagatatgttatgatgattttctgcgttgtttctctatcacaaatttttttaatacaaaatcatagcatattagatctgcccatcagttaagttcataaaaattgtatcttcataattctctctcaagtgaaatggccatattttcatccaatttcatcaataaataactgttaacactctgatccgcattttccgctttaaagttcttagccatatatattaacaaagatagcatacgctccatatagcaaataagttgaattacaataatgggagaaatgaacaaactagagctgtctttccattcatttttgctttggagatagacttgctgtagcatctaggtactgcagctgcaagaacttcatgttggaaaccaatgagacaatagatataattttctcaaacattttttgtagagagactgatcacattcagcaagcaaccacatgtaggttgtcccatgctctcttttatagcagccctcaaatttaatttcatttaatttgtcataagaagctttgctatatatgttgaaacatttattcaatactttgaatacgaacaatagtgatctagatggtggggttaagaattgatgactaatttctcaatagaacatatatggccagaaaagggaggaatgatgaagctattggtacaaggcatgaaagataggtagttattttaaatcattgttaaactggaacattggtgattcttgcaagaaaataagacaaaggaggaaacagaataacaacttcaaaaagccttccactagctaggtgaaaaggaagaaacagaataaactggaaaattttcttgataattgattttacgctggggctcgttgtcctgcaaaccatattccctgtcacggtatctccaataaaataaaattaattcatgcataagttaaaaattatccttttttggaaagaagttaaacttttttttaagaaactaatatgagaacatttgcaaattagtttggaaaaaagtttatttaatttttctttcttattgtcttttcctataaatttgtatagaaatctttttctatacaaacccaaagttaccatatggtaatgttcaataatacaatctcaagggggacaatgtagcaagaggaagaagaaaagaaaagaagaataagaagggaagaaacagttggatatgcaacatgatcttagtaataatgtttctgatagtggaatcagtatatgcaacagaaaatgggctgaagaggggcgtatcttatgagcgggatgaaactgttatgaaacagaaaatggtggagatgaagaatagagatcaaatagtaggaagtgaaaagataaagatatgttatgaggagggatgcagcaagggtccatatgagactaatgatatacaatgagcaggggttgggggaaggattaagtgaaagtttattaggaatgtggtggcaaaggagaacattcaagtgttgtgcattcaagaaaccaagatgctggcaaatggtgatactctatgcaatgctctctggggggaaaatgaggcaaaaagtgtaacaagtccagcaattggatcagtcgggggattactttgtgaaactcggaaagcttggaggtagtaagttctttttgtggtgagggttatattggcttggaggggatttggagagacacacattctttagttactattgttaatgtatatgtaccttgtgagagacaaaagaaagttaaattatgggaggaacttactacaaaaaaaagggccactagcaatatcaagtgttggtgtatcttgagtgatttcaattgtgtaagaagaatggaggaaagaggagtgggagtgggagattataatagaagtgagagggaggctttcaacaactttattgaagattatgactctcaataaccttaatcgccgatttcaatgcatggatttctcttgccatgatctcattctgcaaaaacacccaaataaatacaggcagtgataccatacatcaggtaaaccaatcacggggaggatacttacaagtgacttaccttcttcggaaagtcttttaaaaagtttctgagactcattcacatgagctttcaaaatgggaatcggtggaatcttatgagcaagattgaacttaaaaacaaacttgacagctagaatatgtttgctcctgtcaataagtttctgcacaagatctgcaaaacaccaaaacaaaatttcccccacaagttaaaccaccaaaaattgtaacgctagaaatcaaataatagcagcatcaccatttcaatataaccttgcaccatttttttttataaaaaaaattccaacttcaagatcacgtaacataaacactagggggttaatgatgttttaacaccctgaaaatgggtaatctttagtttttgtccgtgactttcaatatcattagtttccgtccatgtgttttagtcccctaaagctaaaattaggaccttgtgagagacaaaagaaagttaaattatggtattaggggataaagtttggatattggctaaacataggcacgaagatcttaaaagtctgggcctaaaaccaaagatccattgttttaggaaataaaaacgccattaaccttaaacactattgtagcaacaacaacagttaagaaactataagtacaacaaaaaacaaaaacataaatatcgtttctctaaatatttgtataatattagtaattttcatgtaaatatcaacataagataacaaatatcacaaaaaacagtaaaaacactaactttagttaattttataaagattaaaacaaaataagtgcataaataagattaaaatgatctttttgtggttttataataaaaacaaaactgaaaataaaagatttaacaattaacaaaggtattgtcgggattagacttcaccaaactctactttcttttcactttaatgcacaacacatattccatttgtatttcaatgttaaaatcaatcaataaatatctttgtagctctgatcccttagatgaaaaaagtcttaatttctttattaagtcttgatccctcaacaacttaagaaaaatgacacaagataataatgaactaagcttcattcctaaacaacaagttcattgggtattttgtttcagctctatagaatgaagacattttcaacaacaatcatgtcctaaaattatgtcatggttgaccattccacaacaagcattaaacaaagaaacaaaatattaacattgaacacaaacatacatacatacatatatatatatatatatatatatatatatatatatcgaaagagagagagagagaaaaaaaattacacaagtgtaactttgataactattacatcattctataacttataactgaataatgttttcttaaaactcattgtttgattgaaattttttcccacttatatcacatatgcaaaatttcatattaattcaaaatcatttgttatttcgttcatatatactaaaattgacttaatataaacatttcaaatatactaaaatatgaataatttgattacccccttggtgttgtttaattttgacatatacaatcttaataatatgtagatataatttaacgattgaataaaaaaaatcacattctatatcaaattataaaaatgatgtaaaaattgtcaaaattacacatatataatttgatctctttttatatatatatttaccaagatgtacaagagagtttgagtaatgtttcacctacttttaacaatggagaaacttagttacttatagcaatgagtagctccaaaatacatgaaagatggaagagaaatggagaaaaggacccaagggaaaaacttatctccaaaggaatagtgagaacttcgtgtctctagacaaaagaaaaaaaaaatgaaggaccatcctttattagacaaacatccactttaaatacataagaaaacttttcatttttggcaacaattttcgcttaggcataaaatttggtttagttagaatacatagatctcaaatgaacacaacaaaactcttgctcagccatcgattcttgcttagtcaggcttgaaccttttgttctctatctgaattttagcttagcctaaaattatggcttagtaactgtaacgcatttccttacattttttcaagcttttgctcctaattttctttccaacttcaacctctatttctacaaaaaggaattagaaatacaaagataactacaaaataagacaaccaactaaaaagttaaaactttataaaactagattaaattgagtttaacaagactccaaataagaagaaaagtgagatctctaaatttactcacaaattaagtatcgtagacaataatcagatgcacaataccatccatctcctaccagctcaaataaagcaaaaaatcaaattcaattaagggattgcaacctggaactaaaaccaaagatgatcctcacacaccattaaccctaaacactagtgtcatagcttacaacaacagttaacaagctgcaccaacaaaacaaaaacacacagttacaccataatatcatctcctaactgttcaaatataacaaaaaattaagggacttcaacctgaaactctgtctcatttcatttttttttttttaaattttttttctccaataaatgtttatgatttatccaatcagacactcaaagatgactatttttcaaggactaaaaacaccaacaatcctaaacactagtgtcacaacaacagtacggatatgaattgggccataatgcttgggctgctatgccctgatccagtacggatattaattgtatattatttggttaatatataattattgtagtataaattttaagaaataattgccgattttttgaaaactttctcaacaagttaatggggaaaagttcccctaaaataaactgaaacaaatatacaattaccaatttaccgtaatcattattggaaatcaaatcttgagcttaaagtgatgatccacttttcttttcgttcgttggcaaatggcacctttggtgattcaaggcctttcatgcatgttgaaagggatggtcatatgatacaagtaattaactcatggatgaatgaaagggctacacggacttaataactctaactaaaaatagcatttccccataaaataggacaatttccaatgaaaagaatcacattattcttacgttgagaaaccatacggaagattttggaaatgaaagttattcacatattttggaaataaaagtcatcttcacgcgaagcacatcacaatattttggttaagatattttctcccataaatcacagcaacaaagtttggtaaaatctttttaatttcttttcaatggtgttgtaaagccagcaaccaattaattattttaattccttttcaaaatatttcatcaaattgaggagtagaaatcattaatcagggaaattaagatgcatagaacccgcaatgattttacatgatcttggacaatccctccatgcacgggatggataaagtcgaagtacaatgttttccaataattttaatatcttattggtataaatatttgaaataatattacttgtgtttagtctttgttatttgagccacataagatttcattcaataataaaaagagttaataagattattagggaagcaataatccaaacgaataaaaatttaaagaaaaaatcttcaaaataatatatggtttgactgatataaagcattatttgctttatttataagaattatttgttttcaaactatatcatacaattactatatcaaatgcgattcattcttttataataatattttactgtaataaaatggaagaaagggcaagtggcattgacgaactattgttaacttcaaactattacttataatatgcttagtcaaaccttaaattttgaaattttttttagtcaaactactaaaaaaaaacttatttaccgagaaataaattttttaattagtaaaaaaaattaaaaactaactgaaatgctacttaaagaattttttttttattttcagttttaaaataatgttattaatattattatttatatgttaaaaaatgttttaagcaatataataatcaataataataaagtttttttaatttacttttactttttcaaaaacaaattaaaatttaattgtaccattttttgtaataaagttcaaaataccaaatacattcttttacatcatttgatatttataagtcaatttatcagttaattttattaaatacttttaattagcttataagtttttaaataattttcaacttttcagtttataacttataacttataaactttcaactgattttattaaacatagtctaacatacacgttattttatatattgataattttataaaaatattaaaatttaatttaaaataaagataaaaatgataaattaataaaaaaagttaaaaaaatcctttaaaaacattatagtagaaaaagttttcttaaaaacacaagttttgttctaataataagattaactttttttctcctcaaaacaagatatttctataatcgaaagtcatgagactaatcatgagactaatcatcgaaacataaaaatccgattttatctctcccgatatgttttttttcatatgcaccatttgagaatctatctctatgaacatgtttaaagaatcaaattatctactaactctattatatcttattgatagatattttctttctacttacattgtttaaatatcaaataatataatcacttttatctctcagttttctttcttttttcatgcacatagtatatctgactttaattgttaactcttttttcccccagttctctttacttggattcctgtcaacagcaagagaatgtgattctgaagccacaacctgattttgttatttctttctaatgttttcttttcttggaaggtaacctcttccccattacctggaaagctattagaagcacctcaacacgctcatccatcattgtttgccccgcacgcgctgccgtcaaagccttacgcgttgacccacaaaacaaaggtttatttgactttcctcaacacccaaaaaacacgatgcaaattgcaaacccgtttccttagttcggcacttcggctttaatattattaacaaatcttcatttacattttttgatacagaaagtatcaattaaaagtaaatatattcgatatcttaaaatacttttttttatgtttaataaatagaaagaataatacaaagatattatagaaaattcaaaaattattctctagacgttattataatgacataggaaaaaaattctctttcatttattggaatttacccatagcagagatatagacacaatgtcggaaaatttcactaaaatgagagaatctcaatccaatggcatatacatctccaatgagtcatgacatgacaatgatgagtgtggttaaaagacaatcaattcgtttgtttttttttttttttttattaatttgtctccctaatcttttatttttaaaagtcattgaattttaagtaattcaagcagagtaaaataaactcatttttaaaaaaattctactcaaacttctttttatttacaaaatttgaattgaatacgtaatctcaatttaaaagaatcaagtttttttttgtggttgatataatttttaaaataatttttaaaaaatcaactaacttttcatgaatggtgagttttgttcagatgatagtatcaaattatttttatatttgttactatacaattttaaaagatatagaaaaagttgaattcgaaaaaagataaaataatgatcaaagaaaaccgtcaatactttatagtttgaattaattactcctcaacgctgcatctttaataattataaatagtcacatttacacgtctctgacctctcccctcattttttgtgtctgatttgaggttggagcgtagtcagcttctcttttctgccgaaagctgcagaattgtgttgttttctctcccttgggggtcaagcaatcggttctcttcatggttatcaatcttatccttcttctttcatgcattatattcattcatttaccattcttctcctaaacaactcacatagcccaccagatttgaagtattctgtgtgtgtttttctgttttacttatataaatatctggtgagaaattattgtatggtttgatattactacatgtttataagttcagccaatattcatatcacacataatcgaattttattatctctttttagtgaattgaaaaacttgttcacatggtaagagaagattgaccgacatgaaaacgtgatataataaaaatcaatgaattaatggctagacttagttgcagaaaattattttttgattgatttttctttgataattttcatctgaagacttcaatggggttgttttgttattgttgttgtttgtttcctttttcttccacaaaatttagtggcatgctgaatttgatttgatatgattagattttgccgagtatctgattggtcttacatgtgatagatgccgagtgttaaccctgacaaagattccgagccatttgttgagaccgatccaactggtcgctatggtagatacagtgagttgcttggatgtggtgctgtgaagaaagtgtatcgtgcatttgatcaggaagaaggaatagaggtggcatggaaccaggtgaagctgaggaacttctgtgatgatcctgccatgttggataggctttactctgaagtgaggttgctcagaggcttgtccaacaagaacatcattgcactttacaatgtgtggagggatgagcagcgaaacactttgaatttcatcactgaggtttgcaccagtgggaatttgagggagtacaggaagaagcataggcatgtttcgataaaggcactaaagaagtggtctaagcagattttgaaagggttgaattatttgcacttgcatgatccctgcatcatccacagagatctcaattgcagcaatgtgtttgtcaatgggaatactggccaggtgaaccattttattcaaatcttattttccgtccagttatatatcatatatgtttgattgattatcaaggtgaaagtaaactaccaaaaatgcaagaaaaagttggattttttttcttctttttcttaactttcctttgactcgatgccttctgtgtgagatctaagtaattaacttgagcaagtcatggatgatgtctcctgtttgcttgacaaaaacgatcaattacattgtttttagaatactaatttggtgcttacttttttccttgctctgtttttgcctataaatttctactatgaaaaaatatgagaggtgaaataagtgatgcattaaaactataatagggcaagaagatgggatagcataagaaacaacacgaataatggaaaattgaaagtaaaaaaccataatagtctaagatattttgattttaaactatttttggaaactattcttatcaaacatttttttggtttagaaacttcaaacttgtttgcctttagccactattacaaccaaggttaatcttagttatgctgttgttatatatgtaattaacataaaggttttgttagtgattgtatcttttttcatggatatcaggttaagattggtgacttggggttggcagcaattgtgggcaagaaccattgtgcacacacgattcttggcacaccagaatttatggctccagagttatacgatgaagactacacagaattggtggacatatactcatttgggatgtgtgtgttagagatggtgacagtggagattccttatagtgaatgtgacaatgttgctaaaatatacaagaaggtgtcttctggagttagacctgctgccttgaacaaggtcaaagatcctgaggttaaggcctttattgagaagtgccttgctcggccaagggctaggccttctgcagctgagcttctcagagatcctttctttgatgagattgttgatgatgaagaaaatgatgactgttcttgttcataccaatagaatatttcttacagtgttgatttgatatgtgtgtgtgtgtgttttttttttaaatttgattcacctaccttttcagtatgcaatgtcaatttgggcagcctagaactgtgaacataaattgtttatatattttttccatttggctagttgtgaaattggataaggtttggttgaatatgggggttaccaggggagggcttgattggggttggtgtccttttgtttttgtacataggaaattttacagatgagttgtgcggcatacattgaatgatgatttgatttgacaatatatgttaaaatagtatattagatgttatcagcagtcaagggatgtgtgatggaataaatactatatcttgaaaaataaaaatagtactaaagatgtaatcttagaaaggaaattgtataaaaaaatataactgtcccattttagaaggacgtgattctagtaaactaaaggatatgtattaacgatttcatccaaatataaaattacattttaaaaactattctcttcatccttgaaaatcaaatcctttatgtactttttattttatcattttgtagtgtacaagatttattaatctttttatacaagtttatttaaataaaccctaaatttaccatccttaagaatgttggaatatcaaaaatggtatttcaatatttgaatgcttccttttattgccaccttcaataatggaaatgagatattggaagcaatcaaaaacaatgtcagaatgaaaagggttttatcgtttgatttgagggcaaagaaaagtgaagtcaagggtttgaacgcagtttaagcagcatgatatatgttggaggccagcttacatataataatcacaacaagcaaaatgagttgttcatgttttaaaaattggtccaacggctaagcttaatgatgaagagaagtaggtgtgaactaaagggtatttagacttgtatcgtgcaaccccactcatttttgttgtgaaattaatcaaattattgtagtgacccgttgggtgtaccacatcttttttctccttaaaccaataaggaattttgacattgacttttcttattgttttcaatattcttttatttgagggtacgaatccaagcattgtactttgcaaattcctcacgaatgccaaagaactactacataattcaacaacaataaaataatatcattgccaaaagaaaataacacttatcagattcatcttctgcaagagcaaattggagataaagacaagtacaaggtggttaaacaaccttaggggcaatttcaatggaagtttgccaatggaattatggcaggggaatatattccattttaatttcgttacgtttgatgttataacagcgattgcggtaatatcgctcatatattagtacttcatatcatgcaggtcaaggtagatagaggaaatattttttgcagaggtggaaagtcaatgaatgtttattttcaattattaattagttgttcatgtataatctaacatattcaaggcacggcacatgctaatgctacaattagtctcctatctatataaccaggtccatgacagctatttgccaaaaaataagattttttttttttgttttaatgtaaaccagtttaggcaatacaaatatataaaaaaaatacactatttcaaaacagattgcattatgtagttcattaattaaattttatgacattaatgataaaaaaaatagttgcttttaagaactaatttattgtgaatgattttcttgcaaaaattatattaaatttaaaagtgcgatcagagtattaaatttaaatttggaattaatttaattactttcacttatattgatttgatttagaaatatccataatgaaaacttataaagaagataagatttgaattgatttgtaaattaaccttaatatttggatcaccttttttttttaatcatatttggatcaccttaaaaatggataaaattattattttaacaactttatattatatcgtacttacaatagataatcataacatgtttaaattaatagattagtaaccaaattgtactttccattcgatgatatatgtagcaaaattatttatatttagaaaataaataacttgtttaatgtgttgaattttacttaaatttggctgaattctgattagtctggtctcttttctccattgttcggaggtttatcattatgcacagttaagaggaagggatatgtttccggatttgaacctatgaccaataaatcagcaagatataactttaccgttatgtcaggactcgtcctcaatcaaagataatatcagaagatttataataactcatacactatattcaatcgactaagttaaatctcccgaaaaattaacgaattttatattaaccaattgttagaagtagaaggtactgaactttttggtatgcaagcagagttccagggaagtgtacacatgagataagatatatatttcacttggcttgtgacaaataatactcacttccataatctctagttatgcaatttaacgtgctactcactaattctttcttatgcaatgactcagccgcatactcatgaccacagtcccccacaacaaatataagagttaaaaaaaagtggtttaatgtactctgtcttctattattttcctttcctttatttactgtgtctagtctcttttctcccaaacaagagttctgttttcccccctttctgcgtcatttattgcgtttacctataagacatgcaggatatgatgataattgataagggttaagataaaaaagggaaaacaaaaaataatagagtgaaaatcacctatgtatcaaggcactcataatgtctataaacactctcaattttctttacaaatcctagccggcacacctataatcgatgtcgtccaacattcacccatattattactcaaataaattaattaaaattattcattcttatgtgttaaatgaatatatatatatatatatatatatatatatatattgtcaaaataaaaaaataatatattaacgttttggtgctcacatcacatctataacagctttcagcacggttaatgtttttaatatgtttggtttagaatcatgttctccagatccatttttattaactcttatatatatatatatatatatatatatatatatataagagcattgctatttttgttaccaaagaaacctcagtacaaattgtaacgaaaagtgttaaactaatgaaaaaagtgttatatattaatagtataaaagttttattatatgtatctaattataatttgtgattgaataatattttacattgtcagtatcttgataataaactctaatctagttacgatattatttgtcagaaaacaataatgataatttgaatagataggcaaataaaaattggccttgtaacatttatatcaatttgtgcattttttagtattaaggattagttggacttttgatccctcaagtatcataattgtacaatatcaattttaatttttcagattttaaatgtgtcaattaatatcgaattcctcatgtattgcaaatatttgattttaatcctcaaagtatatttattttttctttacccccaagcgtgtgtgtatatatattaataagaatgatgttgttctattaaaaaaaactaaaattgtaccattacaatgttagaaaattcaattaaaatttaagaaacttaaattgcacaattagtcaattatgatcctagacgatgacgtgtgacaaacctttttatcaccattggatttattatattttaaataaaaggctgtgattttactagctttatctttttattttattttatcaactttcccaaattctcgtgagatcccttctctctaaccactatcgtgcaatttctgctcgctcacaataacctgaaagctgtaagaaaaaaataaccatacaatacaggtgaaagaagaagaaaaaaatgaaatcttaccttacattaaaaagaataaaagggaaatttaataaatacttaaaaaacataagatgagtaaaatataggaaataaaaagctaaagtttcacaaatgattactagaagtagtatctcaaaaaaacattacaatatactactaacaaggttaaataaggttttcaacctcaacccaacatgaaaaaacttacaaaaaaaatctcattttaataaataaaattcatgatatccttatttctaataatacttaataaaagtaataatactaataattatccagaattagagaaaaaaaagagatatattttttcaagctaataaaaaaaaatagaaaactaaccgaaatagcgtttcgaacataacggtaaaatttattttttatacttatatatatatatggggtaggtactgaaaagaaaaggtgaatattttagttggagaacagaggatcaaaactcctatctacacacgctgtaaaattttgaaatcccttgtacaaacacttccttagtttatagtaggatagatgcttcatgacaagagttatactgataccttgcaattatgttgtcaatcccgatatacataccattcatcaattttggaacaacgtgtaattttatattgcatgtagatattaacgatgtaccactaaaaacaagtattacacgtatctagcgaaaacttctaagaagagacatgtctttatccaatgcacaaataaagaagattgcaggactaacatgattctctcgcgaaacccttagctacagaggagaaagccaattggagggggtgaccacaaaaaaaaatgcagaacacaagagattttgctgtgtttctaaggaggctagtttcctttgctatccttattttctttatagtagaatgtacaagaggtgattcatcagaatctgagtctttcttcaatttcataagggcccttgatcccaaaaacgtgcttaacattacctggattgagtcaccatcccatccatgcttggtcaagttgaatggtgtaagatgcaacttaaatgctaccaatattgtacatataaggcttgataacttgaaccttagtggcacaatcgatgcagattccctatgcaggctccaaaagttaagagtggtaagcttggctaacaacaacattagaggaaccataccacactcaattttgcgttgtacaaggttgacacatttaaatgtaaccggcaaccaattgagtgggaggttgccaaatgccttaacaaaattgaaacatcttaggaacttagacatttccaataacaacttttctggtacgatccctagtaaacaacattatattcacctccttagttattatgtgactccaagtaacaagttggaaagcaatagtaccaaagagtggctaaaggaaagtgacacaaacacaatacagcaagcaacgccaggtcctttaagcgacagcacacctaataatggcaagaatccacggccagaaaccttgggggtgatacttttgggtgctggattgcttttgtcaaccatttactttattgtaaagaagtcaggaaaattaagtgcagagagagaggtagttaaagaccatcgtcgtttgtctccaataacaaaggctacaactcatgaagttcacgaggtgaagctaaaggaaggagattctgagcttgttttctttgttgaagatcgtgaaaggttcacactcgaggaccttcttcgagccaccgctgacttgaggagtgaaggcttttgcagcagcctttacaaggtgaaattggaacacaatgttcactatgcagtcaaaagattgaagaatttgcaggtatccttggaagaatttggtgaaacattaaggaagataagtaacttgaagcatcagaatattctcccccttgttggttatcgttctaccagtgaagaaaaactcatcatttacaaatatcaaagcaatggaagcctgcttaatctgttaaacggtaagttaagattaatttgtttttcatcagctgcaacactccatatcatcttctctatttgttccctaacttgtgctgcacgagtaattatgtttctgccttgatcatttgaacaatctagctgaaaccccacattagtacattaatataaggcaaatgctaataagtgattaaaaaaacaaagtgattttttttttatcaaaagtgaaacatttaatatatcatgatataaaagttatttgacacttaattataagtaggaatgactttagaatatacagaattacagatagtgtgaagagtttttacattgccatccaatcatgaattgtcatgtataataagattgttgatgacttttgtaataagagtcttatttctaattggttgatagcataaacacaccaccaatgtatcaaaactaaaagtaattgattttttttttttttatgcagattatatagcaggtagaaaagatttcccatggaaaatgcgtttgaatatagcatgtgggattgcaaggggtttggccttcatatataggaagttggatggagaggaggaggtcattcctcatggaaatctcaagccatcaaacatccttcttgatgagaacagtgagccactaataagtgagcatggcttatcaaaattcatggacccaaatagaggtttcttgttttcctctcagggatacacagctcctgaaaagagcctaacagaaaagggtgatgtgtatagctttggagtgattctcttggaactactaacaggaaaaagcacagaggtgagtagaatagaccttgctagatgggtaaggtccatggtaagggaggaatggacaggagaggtatttgacaaagaggttagggaaaatgatcatcaatgggcatttcctcttctcaatatagccctcttgtgtgtgtcacgtttccaagaaaataggccaaccactatggagattttggagaagattgaggaggtcatggatcaacatgaacaacatcacgaacgttgtgcttccaaatgctgttccattggatccaaccacgatgagtgttgttcacttcacaaaatcatacctgaaacgtgggattctccaggatcaaattattgatttatcttcatgctccctataataacatgtattcacctatttatatatcatagtgattcctgtgtgagagcttttctaatttagtcccacatgacttagaaactatgggcattatctagtagaaaaacatgtgatactttgtagtcatcggtttgttataaaggaattaatcctgtattctggaactatgcttttgaacttgattagatacatgttattttaatattttgttaattatgaattttttaactatattttgctatataaatgtagctatatatgcttcaagttgttgattatatagacaacaagcaaaagcagacaggtgttgaaataagtgtactcaaaattgaatttgtttaatcaaatgattaatgtgctgaaattaaagttgaattgtttaaataatatccaaatttgatcatttgtcaaactttacttatcttctaaaatatacttcaaattagtcacaatttatttctcttgatgaaacagagttaaagaccaaaaaaattgaacttgtttatcatgaaaggacaaggaaaagaatcatgtacattccatctgaaatttcaataacatatctgtagaatacaatgatgttacctaactcttaatatatgctaaaatgctaataactttttattttttatttatcccaaaacaaaagagtgtggcatggtggaagccctactgaagctacctggatttgtgggttttacttgaatttttacccacctgaacagatgaataatgataagcatgtcatgcgattgaaactcgtttgggttgatttttcaaaagcaatgagcgtgtgcggatgataattactgctacaaaaaagataaagcaatgaaatagttaatcgaagaataattattatgtctccttgagtcagttcaagtgaaattgtgaaacataaattctgagtacaggaattcgatctctgttatatatttccccttctaaatattttaacttcagattagcttattagaggcttttaatcaatttgctctaacaggtttatctatttggcatgtccaatccatataaatccctatttgtcttacctcgtcaatcaaaacaaaagcaaattggaaaacttaagggaaaaataatatgaaattcctagaataaaacgtattactatatattttttttttggcataaatatttgtgtgaaaagttttattattaattttcatgtataactatatcctattatatcccgattaccaaaaagtttaatttttaatatgaaatatttatgtgagaaattttatttactttttataatagtgacaatggagtttaaatctagaacgaaacctcatgtaaattatctaaacctgttactatgaagttgatccgagtaaaagttttattattattattattattatatgaacatgatgactttatgataccaaacttctgaaaaataacttgccaacaaaatatgaaatttgaaggttgtgtaaaatgtagagagtgtttagaaaagaaagctcaaggaaaataacatcttactatgaaaaagtccaaaaaaagagcgtctcaacagctgaggtctaagttgagtagcatcaaaggcttccaaatcctaaggtcaaacttgggtttccctctgctatttattggtcttcgcagtgttgattcaccgcttaaatgtgcttacgttttttcaacactttaagggttttttttttcttttttcttttttccatacacttgaatgttctagcgtgtaggaactgtgccgcctagtgggctcatactgcagtaaaagaaatccaacttggctctttacatgggactttcaatagcattattcatggtcgtgcagcttcggggattaggggcagcatctgctgtttggctcttgctcttgcttctactgtttattgtatttggtcatataggaactctattatttttaacgggcacgtttttaatctttctgatgttgtggaaaagattaaatttcgtgtgatttggatgagtcatttgtcgcacttgtattagcaactcttttgctttgattagttgcttctctttgacaagtgtaacagcttttgctgtttgattctaccatgtatgtcctgtgtattttgtaagtatcttattggttaatatactcatttacatattttcccaaaaaaaaagaaatccaactgggaatagaaaggcctttagagaagaaaattacgattatttggttttaaaaaaatgttttattttttattttcatttctactcataaagtattatactttattttttcttcttcaatatttcttatataagcttttaaaaataagaaaaagaaaaatgaggtcaatgcgttatgattacgtagtacgttatgatgggtttgttttggaaaaaacccaaggtaaggggttactccagattcagcttcaaatattgcgatctctgcctaagccttttagagtagctttcaaggtgtccataggaggaaccaactgatcataggaatgtggaaaaatatgttaccaaccagtctttccgtgttcttgttttccttcatatgtcaacttggtgtaactcaacgttgagtgttcacgtagcattgcataataataataatagttattagacatttgttgttggtttttcctttgtttataggaattacccgtcggtttgagctgcactttcagttgttaccccatcaaaactctcaatcaaattttaaataaaataaacaaaaaagttgatgctccatctactcccacaataacctaacattttaattcttttgttactctatctttaaaacgttgtaataatctgcaacatttaaagctcattttgaatccaaagcatgaaaagtagttggtgtgaacaattttagactctttttcttaaataaaattttgagtttggatcttgtggagattaaaaacgtaattgaaagaaaaaattccattaaaaatgataataataagtcaatatcataatataaaaaaaattacaagaacaaaatcttaagatatcattatttgtattaacatcatgatcatggatgggtaaggatattaaagctgaacacaaattttaaggatgaaaaatgcttactatcataaatttaaaacgtttttttttataacaatttaaaacgtttttatctctgtgtgtaatcaatacgtaaaataatttgaagtgtcacgtaacatattcttattgctatggcgtttcctatttccaatccgatgattccccaccccccccctcctcctcctccctctcctctcctcctcctcctcctcctaagtatgcatatatcattccatatccaaaacaattaataaattatatttttttcacttttacaaaaaaaaaaaagttatgcaaaatctaaaaaagacgattttgtaccaaataatatgagctaaatcacctacaaatattaattgttcctcgagagtaaaactactacttcaatatgcattttgaagtaaatattagtccaaattctttgaaacaaatatcatcatttcattcgttatttccagaacggttttgcattttgcgagctgttagatgaaaagcatctccaattgaatttcctctttggaacatgatgccaagtaatggaaagcataaattagttttcttaaatatatataatttatacagagaggatagtaataaaatatctaatcaaatttgatcctatataataaatttacattttcatttttaaagtcagatattttttgtgtatatttttctctttccttctgtaacacatgtcaaattaatgtccattcagcaaaaaaaaaaatgtcaaattaatgtttttccttttaattaattattcacttaaatggtacatgtattcttcctatttttttcttgttacctttttctttttaggttggatttgctaccttatatctatataaaatataaaatatatcaaattaataattactataacaaacaatttgttcaacaactccactgcatctatatatattcacattaatttattttatgaaaattcatattatttatttaaaagaaataagtaattaggtgatttacattttccctttatatatagttgaatttatttaattttaaaaataccatgatctgttgtcatttgctggctcctccaaatattcttgcacgatttgcagtgtgtgtctgtctgtctctctctctttctctcttaaaatatatctatttatatataaatagtgaactgtgttttgcccatctttgcttcaaattccatttcttttgatttaattaagagtacctagttgaagcaagcaacaagataagaaagcaaaacaggagagagagaggatgacaccacatcctctgttttcattctcattcttagttttccctgccattcaaattttcacatgacctctcattatttattttttattattagtttcttttgtttccatcaccaaccattcatctttggatggtgaattccccatctgggttcctctctttttcctttgatctcttcgccttctctcaatttcttcttctctgatcccagaaaagaaacaaaaaaacaaactaaaaaaaacatttaagaacatttttttttataaaaaaaacatagctgcttggttttctctctttgctggattagatattttggttcagttttttttattgatgctccaaagatccgattctcttagatcgaatttggcataacccacttcgtatctgattgaagcaccaactgggttctgtctgagattcaacataaggtgacccttcttcacagatttatctaatctgcatttctgatcgctttgctttgtttttgctcatgaaaaattgaatctttctggtgatttagctcaattatgcattattcaatcagctatgcatttagattggttctgggactggaactttgcccatcactgaataatatagaatctagattttgtgtattggaatttctaattttttttatgttatattgttttttggtttggcatgagaattttgattcaataagaatggttggattggatttgtttgatgaaatgagtgattgatggttaactgggcatggttggtgacagaacagatggagtcggatcttggcaagctcttcattgggggaatttcctgggacaccgatgacgaacgtctgaaagaatattttgggaaatatggagaggtgatagaggctgtgatcatgagagatcggacaacaggccgtgctcgcggtttcggttttgttgtctttgctgatccttcagctgcagagagagtcattatggataagcacataattgatggccgcacagtgagtttttcatcatagatttgttaagcattatttcaatatacatgttatttggatgggcagtgatgggacctagctaaatttatgtttctgatagagatcattgtgtccctacttttatattttcttataggacaggaagctgaaaatgacttgcagatttgatccgtgtgtgttgtgctgtcaatttgcaggttgaagctaagaaagctgttcctagggatgatcagcaaactataaacagacagtctggtagcatccatggatctccaagtcctggacgcaccaaaaagatttttgttggaggtttaccatcaacaatcacagagagtgattttaagaagtactttgatcagtttggtacaattactgatgttgttgtaatgtatgatcacaatacccagaggccaagaggttttggcttcatcacttatgattcagaagaagctgtggacagagttctttataagacatttcatgaactcaatgggaagatggttgaggtcaagagggcagttcctaaagagctttcccctggacctacccgaagcccattgataggatataactatggtttgaataggaccagtagcttcctaaatagttatgctcagggtttcaatatgaatccaattggaggttatggagtcaggatggatggaaggtttagtccacttactagtgccagaagtgggtttaccccatttggctccagtggttatggaatgggagtgaatttggatttaggattgaacccaagctatggagggacttccagttatggtggcggtcttggatacgctcggatgagtcctttcaacaatggcaactctaacagatataccactcctattggcaatagcgggggcaatgggagaagcgattctcttatgaactcagcttcccggagtgtttggggaaatgggggcctgaacaatgctgccaatagtccagtcagccctggcgcttacttgggatctggaagtggggcttttggtgtttcaattggaaatggtggcaccaattggggtccatcagttccaacccagggtggaggggctgccactgggtatagtacttggggtaactcttatgaaggtggagataacagcatcagtttaggaggtggagggtatggaaggaacagcagcccaagtgtgcctcaatcctcaacatttactgcaccaactggtgattatgaaggatcctatggggatttgtaccgcaatggttcagtttatggtgactcaacttggcggtctgctgcttctgagatagatgcttctggttcgtttggttatggtggacttggtggtatagcttcagatgatccagtaaagagttctgagggttttattggaaactacaatgtaataagtagacaaactaatagaggtaagatctttggctacatgcttgtctcatgtagaaaattagatcatagtttatacattgtctgttgtttattccattttttcataaaaccaattgtgtgttttggactttctatgtttcagaataggaatattactgaagaaagttgaaaactaagtctgtttattttttaatgtgctattacatttgtctttaagcttatgatcatcatgttagaattgtgaatatagataaacataacatggaagcattattcatgtcttttgattatcccaaacaccctaggttcctgactttattgacatgtttcctttattcctttattcttgatgttgtcattgtaaattcttactacagtctaaaagtatattagggcctctgtggtttgtttgagaaaacattttatgttctcatttcttattttcgcatgtaattactaaaatatcacttaatttttactttatgttttcaaagatttatataggaaatagtgaaaaccactgagaagttatattttctataaaataaatgttttcaccatttcttgtgcaaatctttgaaaacaggaataaagtaaaaaacaaagtggcatttttttaattattagtgaaaacaaaaagaaaaaaaaaaaagaagaaatattctcaaaccaagtatgcccttagcttgctgtaataatgcctgagtttcttgattactttcatttaaagatattcaaatttgatgtttcatgtgaagttatactaacttgcaagatgctagagatgtaggcatagattactcactcttgttaattgagtatgatgattttctcaataattaggatttgagagcttcaaactgtaaaacagaatatagacatagattacacccctttgattcgttagtgaaaaatgaggtttgattatactttcttgtattatattgttgtgaaagggttggcatttgagtatttccattacgtttttttacctgttctggttcaacttcattgaatactcattttcttttgttgcatgtctacttgtttcaggaattgctgcttaggagatatgttaattggatatgttatggtaacagtagatcaagggaaactgattaaaggtgaaatcatacggaagctaaatcagtcacaagtgtttttgtgtaaggtttgggatttttgttgtctttatttttcaaggctaggttcctttcttggaatttgattgaggtgtaacatcagattgcgggatatactcaggaagattggttccagtagtttaattgtgcattgctggagggatgcaccatcatcgttaatatgcttaatgatagtttattaatttttgatttttttttttttttttgccactgtaatgcttggcaaagctgtttgttcttgtcaccatctttttcatgggacatgtttctgatcaaattgtaagtgaagttctgtttgatttatcaggtttgatacattagaggggtacccatcttggatcccccatcaaataattagttactggacagatattattttttgttagacttttgttatacaactttatactttggtttattgttacattcaaaatttggttcctgctgatattacgactctattcataatagttgctttctctcctgtttggttgttgtaactttgtggtgaaaatatcgagcatgctatagcatctttttatggaccaaaattgattggttaaaataagggagcatggttcatttttttttggtagcttatgtttgtcaatagtaaatactaaatagtaacttttttagttttttggttgtttcttacaattccaatttggatcttaagatagaatttgtgtgtggtcatgctaactcttatccttatatggatcatgatttgtcttgtatcactttcagttttcccctgaaaaccccccattacaatgtggtcctctctctctctctctccccacagaggacacacaaaattgtatataactatatatatatccatagtcttagctattaaacagcttatattaacttggatgtgcacaattattagtacaatacttgggtagaatatcattattctaagccatgcaagcctgtgttggagattttagacgattgtcacatgcaaatccatataaatgcacatgcctcaattatgttgaaggttgtggttgtagacatatggtggaatctttattaatttgaagacaatagcgtgtggcaaactggcaatgacaaaatcatggatgataacaatgtttcgtttcagaactccttggaagtttgaatgggaaaacaatgcatgaatgaaattgaggctctatagataaggatgttggggatattgaaatatatgataccataactattttcaaaagcaatatgccttaggctaacatcgggacatattcttgtgtatttcttttttcattttataacatttttggagcttttatatctaattaaattaatacttttaattaatttcaatggatatttgcaatttcctatatatcgtatattaatgaaatttaaatcagtgcatttagatcggtttgtctctttcaacttatttattgaattagtttaatttatatgcactaaaatgtgtgtttgtgtttggcttaggaaataaaagtgaaagaaaagaaaagagtgaaaattgagatgtctttgcaaatttttcttctcttgtttgattttttagaaaaaaatgaaatacaaaatatgaatataaaaatgacgtaaatatatctactaaaaaattatacatacaataacagtaattgaatctttatttataattacataaaactatccaaaaattagacacgtgtcaccattttgtgccaatttttacattttttttttctatttatctctttgcaaattgcaatttttttattaattagttttccattgaccttgcaaagcacaggtccagtgttgtagttatttaagcaagaattccttcccctttctcttcaaattcggaggcattattgaagtgtgtaggtactaggttctttccttctattttgaagatgaaaaagaatatagaaaaaaaaggggtatttaagtctgtttaaataaactttcctttccctttcttttcacatttggaagaattattagtgcgtgtgagctcatgctttttattccttctttctctttttttaagtgctccaaacaaagaaaataataaaaaaattggtgtttctctttcatccttcccatttttttcctaaactaactgtaggaggactttggtaggggaatattttttgattttatgagaattataggttgaaaaacttagttttccatgtttgatatattttttaaaaataatatttctttaaaaggatatttgtaaatcaattttccatataaaaaaaatcaatgaaaaaggtgaaaatcttaattttcacaagtaatttgtcttttaatacattaaaaatatcatcttactctttatcaaattatttaatttagtgaaaatattgtataactctttgatttttaaaaaacttatttaagattccaataatcaatcaaacaaattttattcatttccaaaaaatataattcctaagattcataatcttcagaaatcataattcttgcacataaaaaaattgctcttgtattaaacgtggtttaagaattgaaaaatgtcaaccaaaattttggtataattgctataaccttattttgaatcagctaacaatgtaaaaatggacatcaatcaaataacaatgtaaaaattatttacactgtctgttcatcaattaattattcttatcgaatcagcttggttatagagttgccataagcccataaccttatagtgtccgcagtcaaaacaagcaacatttttatactctacattgggttgttcacggagaggcattctagtaagcttttctgtttgggtcggtctttgccagcaaatgtttttccttatgggattggggtcatgccgtgtgtgtttgtttaagttttgtgatcataccaatgctcacatcacggtccatataggcttaggctggttgaatctttgtggtaggacctttagaattgcaaacaatcaaatatatggtatcataattgatgccacaaatgagatgttacaacaagtttacaacttctgctaaaagttcatccaccttttacttgatatacgactctctgtaaagttgtgacaggagtaacaatttgtcccacagcttacaaatagaattgttttattgacgaacgagtcatatttaacgcgatgaaggatattaaaatgttagaaaatttttgtaaacatataaattataataggagtagtgataaaaaactacatattgttaaccataacatatcactcggcttaaagtcaaacactaatttttcaaagtaataatatttatttaagagattcatttcttccatagatatattttcatacacattttatgccgattttcataatttgaaaatagaaattgatgtttacaaatcattatttgatctgtatgaaaacattttttaaaacattaaattattctttattaaaatattctcatttcattaattaataatctcttattttatgtattaaagatgataagagatgagggtaaagtttaaataactataattttttcttttgctaaatcaaatatttttttaaaataaaaaatattttaaagccaaagaaaaattgcataaaaatataaaattattttttaatttttttattaaacagttataaaagatatattttaaaatttattaatttaaataaaaaaatggaagagtagaagatagatgtgatcagtaaattatattctaaaataatcatggtttcctcatacttttacttactttttttaggtctcctgttttggcattacttttgtcctatgttttaccactttcttttctatggagggctttgttttacatattcattgcgtattttcgagaataccaagttgggaaaacgactttttttttttggaaaaacatgagttctgttacacttgccaaaagaagcaaataaataatagttagagttagccaactaatttctatacaaacacaaatttgctaatacaagtgtaacaaatgaaccatcttaagcacatgaaatttaattttctcaataacatcaacaatatttaaagtttgaccataaaaaagaatacagtttcttgtcatccaaatacaacaaactgggaatgccagagccaagcacctcatcttcccaaagtgatcggaagtagcatgctgatggattaagctattcaaagtgcctgcaatgaaatatttcttctaggaaatccgatccaatcccgaactgctgaccaaatgcacaaagaaaatctgcactgaaaaaataaacgatcatgcgtttccacatcagaattacaaaatgaacataagctttctttttcaaggaacggtgccttgtccaaattacaattttagcttataactataactagttggctagctttgcattaccctacaatgcacgggttggcttggttactaccaaattatatttacaagaaattaagatactctgcaactacttttcaaactacaagcatcttgcgatcacaccatagtttttaagataccccaaagggatatgcacactgccagattgaaataatatattttttcgatcatacccttcttctcttgcacagttgcactcatgccgttcacctccaccatgatcactgtttcccttttccaatctcaacaacttccaatctccgctcacatcttcgtcgatgctctcgacaccttcaaacctcaactttctctctctctctctctctctctctctccctctcccgcactacaactcgcgagatcaattcgccgtggttgtgcggtggtggttggttcaggattcaactagaatgggtttttgttatgtgtggtttaatttgggttttggggagaattgtttcctcatcgttggggttgtaggcaagtttaaaaaaaaaaaaaaaaaagatgcgttttttgggatgaatttgtaggtggaggagttgcggctgccgctgaggtgggggattcgtggtggttcacggtgttgtgacggtgggttttacgacggggtaggtcggatttcagatctaaggaggacattaatcgttttcattttgttctctgttgacaccgtcgatgcggagcagtggcgactacggggtggtgtcagagagggagggatggttggatactatgaagggagagggacatatcgagaaagaaaaataaaaaaataatttctatgctgacctgcataattttagggttttgacagtcttaatttttaaccaatattattacatgttattttttcattagtttttcttttcttttcaaattagtccttattttttttttaattttcaattttttaaattaaaaatatgattaaaaataattttagtagtatgaattctaattttttttagtttcctttcaacacttttttttataaaaaatcttttggggtttaaggttttataaagagcattgaaagtaatttaaaaaatagggtttaattaaaaagatgacataattttattgattaaaaaattcacagtatcaaaatccctcaaattattaagaaaataatacttttaattttatccggtgtagggatttccaccgtagttcatcactattttaaccactgatgttaaatttaaaaattcatatccagcggatgatgtttgtttcgcaccgtgagtgtctttccaaaacttttctgtcacttgtcagcaccgtgtgtttttaaatgtgttgctagtgaaagtcattggatttaaactgaatcagatgtagttcacttgtgaactcgaggatccatatcgtatataacaatttaagatagttgtatataaagaaaatagtttaattttcattgagtacaatacctcaaattttaggagaatttcattttcgttaacaaaacaccattattccaaaaatccaaaattgagtacaaaacctcaaattttaggagtatttcattttcgtaacaaaacagcatcattccaaatatccaaagttgtttaatttggataaaagaatgtaggcttaaggcccaaatcacgaaaaagaaaaagaaaagcatatccatgatgctgtacggtactcttgttcgtgtgaaatagaagaaatcaaaatcatagatgatttggtacctccatcaactttagtattcgccatgtgaacgtggggaccatgttagtaccactcgtgattatccacagcatgaaacttttgccagatgaaaatcgctttcacaaaatattgacatccaaaacaaaaagaaacacaagaaaataagatcaagacagaaaaaagttcatgtagcagttaagataggaccaagcctgtgagaatacaaagttaagattccctgttacctataacagatcaacaagtacagaagcgagaatcccactggacagtgcattatttcatttcactactgacatcagttttcattctaaatcctatgtcacctgaaagtattcccttgatccaaaggtaaccaaaagttcagaagaaagccctgctgccataaaacacacgggagttagtgctctttggtgtctgtatcttctgttcagagctagagtttcctgaactagttggtccactttcaaagtccataggaagcttcattttcgccagtgactcggtgaattgctgcatgcttttcatgtacatgtctacaaaatcctgctgcaccacattaggctccggctcgatgttaacagtcacaacaggcttagtgaatgactcattcagcaccccatttgaggagtcactcccaccatctttgacatccccatttttctcttcggtggctgaaatttgttcctgactgggagacttggaagcagcaacatcagatgagtctgagcttgcagccactgaaggagatgaaaccccatttgttaacacactgctgcgtggagaatcagccttaggaggttggacagattcaacactgcatgctgagaagctctccacaatctgaacacctgcttcagaactaagattttcagtatcagtagtggtcaagctatcagaacactggctctcctcacatggaatgccaaagtattccgaaaccatccagtggtcttcatttacaatttttggatctgggaattcaattttgtccaaatctctggccagtgactcacatgattctgagtccttctcggtgccatttgcggccaactcagtaggcattgcagaaatagccataacatcaggtgaagcaccgatataagcaagagacaatttaacaaaaccagctggggaatgaaataaatcagttgaagaaagagagaactctttctcaagttttccatccttcaccagtacttcagacaaaggcaccaaagcaaaaccaagcaactgatcttcaagataattcttcaccctgctcagcatccaaatttcacatttgacagcagaatcaacagtcctaacgcttagacgaagattctcattgaagacagggttccttcctcctccattgacagtcttggtagagacagtattctcaggattactagtcaagcaaatcttagcataaacatcttgcttgtggtatatgcagatgttatgaatgtccctggcctgatgaatgtaaacatcaacaacaccgatggattcctccggattaacctcggcagcttcccttccattgacttcaatgtccttagacaaaggacccgagctttgtgtgaaaacatcagacctatacttctcagcttcacccaagacagagctcttgaatggtgacacaacagattgtggggattccatgatatcacagtgattgggaacctgacaaagcaaaaaaaccttcaacaaattcaagtcactctatgttaagctaagcttcaaaccaacatcacaaatgattttttgaacttaaacccaaacttcaaacaggaacaaggaacaggaagaactcaaaattcactattccaagaccaaaactgctaaaactcagcttgaaaatacttccttacaatttgcagcccaggaaggattaagcacatccaaaacagatagaaagtttctagtatgtgaattgtgaagtacaaaaaaatagaaaaaggaagaaaaaggaaaggcaacactcaatccccaaatgtgaaagagaagtgggaagcttcaatctgaatttctcctaagggctgtcacgtgagttgtcaactaacaggaaggaaggcaattcagaaacaacaactccagttcataccttaactttatagctaagagcagagaaacacggaattgaggatcaaggtccacaaaacccaagtagagtgaaacgaattcccaggaaccagaacctcagcttcaaaattgaaacttttcactttctagagaaatactaagatgcccagaaccggctaaaacttaaaagctatcaataagaataaagggtattgccagatttgaggagattctaataaagctactagcttttttttctgctgctctatgcagaaaaactaccagcggaatccaagggagggaaacagttaaagcaaaaatagaaacatacaagaattcagagagaaacaggaaacaaaaaaagaagagagactttgattaaaaacacagagatgattaagttgttgtggtttaacatacctgccttaggcccttagcctccaaagtcaaagcggaatgtgttatgtttgtggctctaatccagaatgaaggacacacaccgtgttggtgatgagaagagaaggaacaaaagcaaggtggcttgtttaaaaaagggaagggataatgtgaaaggaaaggaggaaatagtgtgaacagtgaagaaaataaaaatctagaggtgctgtagtgttgtgtgttggtctatgattttgttgtgtgtatttggagtatgtatgttgagagtatatatgagcaattaataaggtgctgtgcatacacagagggcactcatttattgcaattgttgtgtgtggggatagagagagagagagaggataaggtatggaaatggaaggggatgcagcagccccgcgcgaatggctgagacagaccaataagaagggagttgtgtgcattttgcagttggaggtggggtatgctgcttatgacttttctttgtactttttctgctccacacttctctttctgcccccacctacgactttgagtgagtgcatttctgtccttctagtgttttttattgtttttttttaaacaaattaaagtttaatggtgatgttggtaatgtataaataatataaaattattttatattattatttaattcttaaaaaattgttatcaaattataaattatcatttgtataatttttaagataatttaataaaatttaataaatttatcataaattataaattgtaatttaatgataattttacattgttacttattagtgtataatcttttttttcttaaaattatacatatatattttataaacagataattttgtttgaactatgtagtatttaagataattcttttttttttttacaaaactaatgaatataacttagttgataatatacattaagtttatgagagaaaatatgagaaagaacaaagaattttaaatatgattataagtttggattcgaggattaattctataatttgtccaaaaggtcaagcttgtagttgtgggatatcttagagtctcaagaaacaaaaactctaattagagagtacttaaaatatttatgtatcttgatgtatatgtccatgatatttcttttttgttgctttcacatgattatgaagaataatttataagataatagtttaattttcatcctttacaaaaaaaattcatgttataatttcggttatatccagtccttataaaaatgagttagtattaattttagctattataaaaaaattatttaatttgtgtccctttaaaatatgaaattagtgtttttcatctttataaaaacagtaaattttgattttggtttttgtttccttcatatatccttcctaaatgtgaaatcattgtttttttcttcataaatatcatttttagaggtaattttgtttgagacactaacaaacaataaaaaaaataatctctttaagtataaattcgaaccttgatttgtcagtttgtgaggatgagtctcttccgctgcactcaatcctcgttggtaagaaactattgttttaagttcttaatgtttattttaaaaaataacattatttgaagaattaaaaataatttagaaatgttacatgctgacatagtatcacagactagtaggtgtcacttggatattcacttaacctttttattttaaaataaataagtaaataatattattctaggtatctaaaaataattttagaagtgtcacatgttgacaaggtataccacacagtaggactcacttgaaagagttactttttatgaaacatatgagtagttgagaagtgaatcttactgtatagttgacaagtagttgaaagtttcacatgttctcgatcggagcactcaggacctgagtttgccagggagatttcctactcttcatctcagtaagatttgaatttgatggctatatagatgaagacccttataatagaatttaccttgatgaacatgaacaatcaatcagtctcattatattgttgctcagccagtaggttcatgttattctgaaataccttaattacgtatactcgagtcttgggtttatagagttacaactacatatcaagaaataatcaattaaccctctttcttttcatgtataatcccataaagcaatttaacattgttggtgtttctctttctgtgtcatttttttatgtgaagaaaaatatgaagtcaaatttgatcatcaaaaatcctgtgcaggaatcctgtgcaggaaatgcattgatgttatgtgagtctagaacatgagagatttcctcgcatgataccatcggtcgcccacttatgagaagagcttttgcacttttgttctagaaatttgccctttttcttcattcgtgggtcccatggcatatgcttccccgacgtattttgcaactcttgcaccaaagttttacgtaaaaatcaaagattaatcatggtggggtcttctgctttgttcatcagctcaaaatgacttcttagaggtatcaacttaaaagaaaagaaaaatgacttggaggtagacaacaggggcgtcactagttcactattcaacaaccctcaattgtgtctttggaagagaagttaaatggcgtgaatacgtttttgtaaaacaatttcagagaaattatgttttgtcagtttgttacttatttcgtatttacttgttgaactttctttctcctacaataatttatcttgagcactatctatgaatatataaagcattcttaatagcatatatatatagcaactgaaaccatgatgtgttgataaggaatctgggtgttacgggtctcaaagtcccacattattgagtaatatggaatgttgggtgaagtatttaactgttagttctgttttttttttatatcaataaatatgttctttttatataaattaaggtatattaaagttggttatgttctctatggtgtggttgccaaaatgtcattaatttgatttttctatttataataaaataataatatttgaacatctcattattttgaccacactatctttatctcttattcttctctttttttccatcatactatcacttgtcctaacttgtaatggatataatattatttatcatacttatataagtgtaataaattatattatcttcatttttatttaaaagagagagaaaaaaccatgactccaaacatatattttatcaactaatttttaaaagaggatttcccaaatagtcagatcatcctctcttaaaagttagatgcttgtgatgttgatcttcttctaaagttgggtaatgtaatatagtataattttattggtgtaagaaattaccaattttttgtcaaactatcatagttaattatatctttcggaggactatatcgtctattattgtagaatatctcttgaaatttatcaaatatttcatccattataaatttttcagttctaaaataagatgtgacccaccactattaactactcgtgcccttcaccgattgaatattttcccttaatttcctaaatgtgacgcgtgtcgtgaaagaatcccaacccaagtcccctatcattattattattatttctatatattgttttttattaatagaaattaaagatattaccaaaatttacaacaactcatacatatttatttaactaagtgagtgagatccgtgacaatctgcatgctctttcttccccttttactttctcttttggatcggtaagaaaggatgtgcattggagtgctttcatgtgcctttctacttttgctcatcaaatacccttttttcatccttcacatatatagtcggtatatggatgccgtaatttgcgtacaaagctttcagatattagacaccgtaatgaaaattattgaccaataaagctagtataaatactaaattaatataatagattttaatatcttctttgaattttttggatttgaaggacatgtgggtaccatgtgagacttttgattgttgcaattcgctgttgcattgcatataagaacaaatggcatagtcaattattaacagtgagttgtaccatttcaagaaaaatgatataagcttctggaaagctaattacgtaattattaaactacgattactattgactcgtgatagaattgaaatgtatgtatggaggacgagcctctgatttccttcttttcttttttctttttcggtattttgagatgacaaaagatttgtatcaatgaattctaattcaattaattgaacatgacatataaattattataaaacttttgatatttatttttgattctcacatataaaaataaaaaatttgaggtgatgaaaaatttgaaggagattatcccattcaggatatatttggataaatattagaaactagttttatggattctaatgcataaaattaagaagaaaaaatattactgttttttgagtaaaaaaacttttttctcttaactaaaatttaaaaatgcacttaatggcagaagatatgctattaatttcggcgctaaccacatgattcttatcataaggaaattgttgacagtggaaactaaactcgagctttttaatttcaataattccaaactaatcatgttggcttgtgagttgaaaaaatagttatgccttgtacatttagttacataattttgcgtaattgcccaggtggattgatgctattgtgccaaataaaaggtaaaccctgaaaaagtgttggcaaatctcgacactgttatcgaaaaattgaaatcatatgtgttcatttcccattatcgttttcaatcaaactactcccatatcttttatatggataaaagataaatggatatccaaaactattagacacctaagtgtgagagaaaaatataaaaaaaaatgattccgtgattaaatatataacagtaggaaaataatactttgagaactaatatgatagtagacacatagtgagagtgataaaaaatgagaaaatataaatattataaataatataatatgataagaaaagagacagagaaaaataataaatattaaataaatgttttaaaaagaaaaatatcattgttcataatgataaaactttcagttatgtgagctagctcataatcttagtaaaaaaaaattactagttttaatttcaagttggactaactttttcctcccagcccaaaacaccacagaaaaaaacgtttaatttaaagtttttgtctaaacttatctatggttttcctctattaaagtctaagtagagttgtgtgtgtgaaaatagagggagcacaagagtaatgcatgctgttgttataattaagtttaaagttgagtgtgtggataaagctagaaagcttaaggggctaagctggctttacatgcttgaatatcatgctggtctcaatgtggcaactggagcaatagtcatcacaaaatcattcacctaaagttaagtgcgtcaagagggatcacatgtacagtctgaattgtaagctcatgttatctgcaaatgccttaattatgtgagtgtggaagagaccaaaattaattaaatataatactcgtgtgttgctcaaatttatgttaatataaagattataatttaaaatattaaatatgtatttttttagtataggatactagattgtggacaaagtttgtagtataacattatatttttattaaatttaaaatattaacaaatactatacattaaattgataattatattacttaattgatattttaatttattataataaagatttttaaaagttattacaattcagaatttaaaatacatatttaattagaataaatattgattatatattcctaccaatttttatggataatttttctttggaatgtgaataaaactgaaaaatagaagagagaaaaaaatcacatgtagaataaatataatgacaattttttatttgattgaattaattttaaattattaaagtgatagttaatgtaatttattataataaatttggattgtaaaaagatatataataaatttagaaattaaatatattcaatacatcaatattatcaatcaaacactaatttattaacatcaatatattgaataattaatttattagcataaatatgttatattaatgttagttaattacatttaattattaattatatttattagaattaaaaataaaataattttattgaatattttttaagaaaataaatataagtttgtcacattatgacatacagcaaaatcttctttttatggtagatttaatattgacctatttagatacttacaccctttacatgaataggttagagtaataattttcctgacatatctggccctttctcatctcgtcctaataaatattaatattacggaattcttctttcaattgcagccaaattgtataattgagatgttttacccttataatatccagagagaaaaaagaagaagaaaaacataggaatataaaaatcatagtcacaacaaaagctcaatttaaattaaatgttttttttttctttgtttgaagccattatttgtctttaggaaagaagaaaggataatttggtcatttcattggctattatccttcttccaacggtcatctaaacctcctcaattcaaaaacttgcttctcttctctgtcttcactctatcgacgtttgaatccaaaactctcattctttctgtgtttatcactctctctctctctctctctctctctctctctctctctctctctctctgtgtatagcttcattgctaaattgtttgcttgctcagcgaaaccataaccatgagacaaagcagtaacttagaaactgcagagactcgtttctctggcaccatttcatcctcatccctcaaaaaatttcttcccagatcactctcttccaaacacaaaaccatttcaaaccctaaaatcccaaattcagatgcagagaacactcccccaccgatcccaacatccagatcaaccatgaacaatcgttgccttccacaaccaaacaatcacagtccaaaacctcaatttctcagaacaacctcaaaaaatcgaaattccctcttgaatccgacccatcagtcaaggtaatcgccaatttttctctctttttgggcttatttttttgaacattgaagttgttatctgtgagtctgaagatgggtatgacgtatgtgaaaaaatttctgctgcttatttgcttatactatggttctgaaacaggttgtagtacggatcagacctacgaataacaatggaatagagggagatcgaactgttaagaaggtttcttctgacacattgtgtgttggggataggcaatttacctttgattcagtttttgattcgaacaccaatcaggtaaataacttcacttcattgtgctatttgtgatttatgttctttatctttcaataattttccatgataggattaaggtaatttacttactatttatatgacttgcttttataaatgaaacaactagtatttttttaactttaaataattttctctgataggattatgatacttactatttatatgacttgctcacttgctttggtgaatgaagcaactaatagttcattttatttgcttccatgctgttaagagaagataagtgtgatttatataagctgttgtttgttcaggaagatatttttcagtcagttggtgtccctttggttaagaatgctttagctggttacaacacttcaattctgtcatatggccaggtacttcttgatgtttgctatattattttaaccttttagtgagagaaaaaaatggcattcttgttcgacaattaattgttggggattttttttatttttcttttaattctttgctagtctggaagtggaaaaacttatacaatgtggggtcccccaagtgccatgtttgaggagccctcgcccaaaagtcacaagggaattgttcctcggatcttccaaatgttgttttctgagctggagagagtacgttttacttcctgctttaaccactaaatctattttctattatgtttttgattattttttatttttatttttcaattactatattaggagcagcatgtgtctgacgggaaacaattcaactaccaatgtcgatgttctttccttgaggtaattctttataaaacttcccattttggcttccttgtttgtatgatgatgatcttgtttctttttcatttgttgtttgaaacagatatacaacgaacaaattggggatttacttgatccaacccagcggaaccttgaggcacgcatatgccatccttttgtgctacaatttatcataaaagactaatacactagttttcgattgctgcatgcttattatggctggtctaaattattgcagatgaaagatgattccaaaaatgcattgtatatagagaatctgaccgaggaatatgtcactagctatgatgatgtaacacaaattctgattaaggtagggactacggaagcatcaaaggaaatataatatattgttgaatattatatgtctacatactatttatactttatcagcttagctaatttggtctttatatgctgcagggcctttcaagcagaaaagttggaacaacaagcttaaattctaagagctctagatcacatataattttcacttttgtgattgaatcttggtgtaaggtattgcccactataattgtatttaaagtgactagctatggaagactaacatcttttttttcttttttcttttttttttcttatttaagattgacacagatttatattgttaattttctcttagttaatcgctacttctggttttttttgactggtgctgcagggaatatcatcaaatggtttcagtagttcaaaatctagcagaattagcctcattgatcttgctggacaggacagaaacaaagttgaggatgcaggcaagcaatgtctaagggaagacaagaatgtaaagaagtccttatctcagcttgggtaagatgccatgtcatgactagatacaaatgtctaaagttggtagtttttcagttatccaaatatttattaaaattgtcctggcaacacatacgtggcttctcttgatttccattcctgcctcatgccatttactattttttatttgttatttgtgattttaaccgtttattgcatttttttgtctcttccgagcaaaatgcacaggaccgcatctagtgttggttgaaagcaatatcttggtcttatttatttatttaatgggtgaagttatcccgtccttattttacttctttgtaaccactattttatttcactgctgtaggcacttggtagaagccctgactaaagaaactcactcagaaaaagcagaagaaatttcaaacaggaattcctgtttaactcgtttactacaagaatcactcggtggaaatgccaaactctcattaatctgttccatctcccctgataacaagtatttacctggaccgaggagcattacctattcatgtgtatgccagacatcttatattttgtttctagtggtaaagattgtatttgttgattgtaggaataatggtgaaacgctgcgcactctcaggtttggacagcgagtaagaaccattagaaatgaacctgttatcaatgaaataaaggaggaggatgttaatgatttaagtgatcaaatccggaaactgaaggtattatttatcttcaggacttcactgacatagtttttaatgggttgatacagatctgacatcacagaattatgtgtttgctttggcgcaggaagaacttattagagcaaaggctgaagttcatagctcagatgggagtaaaaatggaaacctccaagtacgcaatgtacgggacagccttaatcagttgcgagtcagcttaaaccgctctctactcctaccctgcattgataatgacactgatgaagaggtaaatgtggacgaggaagacataaggaaattacgccagcagattgatgaattgtatcattcgtgtgaagagaaccctaaaaacatatctgtcagtgaagattgtgtccagtattattctgttgcggaaaattgtgacacagatatgaccagtggtgatgaaattgaaaaagaggaagtatgttatggagaagcaatgagtaagctatgtcccgaggaaactgagggatcaactaccaccttggatgcatcagcagatgactttgcatgcacagctaatgcctcaaggacaattaaatctacattcagagatagcatttcagttagctcatgtagtcggtctccaatacttggagaaccacagttgtctgagtctccaaaaatcaagaatgtccagaggaaaagtgtggcttattcaccaagttgtcttggaagttggaacaatgtggcagaggagaatatgagttccagtaatgatatattaaggcaatcatttaaagagggtgagcagatgcgatcgtcactacgttccagcaaggtttttcaaggtcctaccgactccttggcagcaagcctacagaggggattgcagataattgattatcaccagcgaaactcagcattaaacaaatcttcaacttccttctcttttgagtgcttaaccttgacaccttgtccagaagacaaggatgattcttgtgatcaaataatgcaacagaagaaatattctgtcgatgaaagaactgctagcttgctttgcgaatcttgccttaaaagaatatacgatcaggattctactgaggttcaagatagcataaagtcaagagttgaaacagctgaagcagagaatccggatggactgacagataaggttccaaaagtatgtcttatagacgatttccagaaagttctgtgattaattttcttgtaaaactgatttatctttgttttttatgcttaaaggatttacagagtataatggataaagcaatctcgagagaaaaggaactagagaaagtttgcaagaagcaagctgctagaattgaagaactaaatcaattggtataaggagtcatgccctcgtgaattatctgtggtgtgaattttacattactgacaatttagtttggtttgtccaggtggagaaattgaaaggagaaatggaagtaaaatcttccatcattgtgtatgatccagaaagcaataaactgactagggatgaagaagagtataactcattgaaagatgaagacaaggtcaactgttggttttgtaatttaacaatataaagtcctatccattggaatgtttggaactcgcccttttaacgtaccttttatgttgtttgcagcttccaaggggaacttccttagacaggcatttaccaggtattatagaggaaaattgtgaaattaaagaagtccaggaagacgtaaatcaaagagacagctctttcgatgcagctgagaaggaagaacttcttaaggagattcagaatctaagaagcaggatgcaattatgtagtgatgcaccagttaaaaagtccaccgacaaactaagatcatccttatcattaatgtcaagatccattcaactccgaaaaagtggtgtatttgctcttgataatggtggagatgagctagagaaagagagggagagatggacagaaatggaaagtgagtggatttgtcttacggatgaactaagagttgatcttgagtccattcgtcagagggcagagagggtagagatggaactgagtttagagaagaagtgcactgaagagttagacgatgcactaaaaagagcggttctcggacatggtagaatggtggaacactatgccgacctccaagaaaaatataatgatttggctgcaaagcacaatgctataatggaaggcatagcagaggtgaagaaagcagcggcaaaggctggaaaaaggggacatgctcgctttgccaaatctcttgctgctgagctttctgcattgagggtggagagagaaagggaagcaaaattcttgaaaaaggagaacatgaatctcaagattcaacttagagaaactgcagaagctgttcatgctgctggagaactacttgtcagactaagagaagctgagcatgcagcgtctgttgcagaggtaaaaatcccatcaattttttcaaatgcatttgataaatgaactaacttggtgggggtgcattactttatgcttaacgcaaccctccctaaaatcaatagatattagataggacttgtggaaaacgattttgtgatgatccatttcggacaattctaattttctcttgattttcatatttcttatacaggagaatttcagaaaagtgcaacaagatgatgaaaagctaaaaaagcaaatggataagctgaaaagaaaacacaagatggagattgttaccatgaaacagtaccttgcagagagcaaattaccagagtctgcactgcagccactatatagagaggattctgatgatgttcacaaggatgcaacttcccatgatgatcaggcatggagagtagagtttggagcaatctatcaacagcattattaattcgacattagttggattgattaacaattgatgagtttaacaatcaaacttccaaaagtttgtctagcatcagaagatccttcttggatcaatacaccccatttatattctctgtgttgttttaaaattcattctattttttaagctgtgtgtgttgttttaaaattcattctattttttaagctgtgggagcacttggtttttggagttcgaattcttttctgtttgtactgacagtaggtaaaagtaataacatcgaattatttgttctttaccgcttgagttttgctggcaaatacagaagctacagatttttttatgaattatttgaggaaatattgtttagaacggatagtcggatacaaacacaactcacacaaatctgtacccaaaaaccaaggcaactcacaaatatggtgtactttaaaatattgtgaaggctatattaagttaaggatataaaaaaaatactgtattaattgtttttgttatattgagaatgagtatattttaggcaagggaatgaagttttttcatgataattagttttatattttaaataattaattgctaaagataaaatgggaaaataaaagtttttggaaaaataattcaatagctttcagtcgtaagtaaaatttttatttataataaaaacttttgaaacacgggagaaaaaaagtttttcatattaatctcgtttaaatacactttatttataaataaaaataatctcaaaagcaggaaaaacttcttaatattatatatttaaaaattattcatgtcttctttctgttattaatgaagagacttattcgatataaattattcatttaatatctaaatatttttaaataattagttgatgacagttattatgtcaagctttcaattccagacataggatttcacaaatatcctttcaaacaatttgaattggtattttcagtacatttaaaaatagaaaaaaagaagaagctctaagcgataatatgttgtgctctctcgatctcaaaataataattgttctaggttatgtttatataaattaaaataataataaataaataaaaataataaaaatatataaaattaatcttatcatcattaatttattttatatattttgttgttcgtcattaattataaagaataaaataaaaaactaatatatatatattaaaataaaataataattatttttaaataatttttttctgatgataagtataatataacggagggagcatttgattaaaataacttaatttttaaatatttttatctcaaaatgtacgttatggttaaaacttaaaaagagtgaaaaaggtggaagggaatagaacagcgtcgtggaggatgttgcaaagggataacatcactcactcactcgcacacaatagaatcaaaaagagaaaacccaaagaggcagaagacacagaagagaggttcaacgtcttcatcatctatggcgacgccgaattctgacgcaacctctcagactcaagattccgacactgttcccgattccaattctcccaacgccctcgtccccgccgctcccgccgtttgcctcctccgctttgccacagactccgccggcggcgctctcatgggctccatctttggatacggttcttctcttctcttctctcctctccgtattatcgcattacgccgtcgtttcatagactaattaccgtttaagcctaatttcttcgttcaactatttagtcgaagatttactgtttctgtcgatagtatgttaagaattcagtgcttgaattcttcttcgaagatttactgattttgcttgaggatgcatgttatggtgtgtttcaggtgctggattgtttaagaagaaaggttttaaaggatcctttgtagaagcagggtcttatgcaaaggtacattgagaatctcgctgcctttttttcctgcttgttttacattggatacttggttcatatgtaattttttttgtgcttcaattgagcttgcaattaattatgttgttctttttgtcattagacatttgcagttttgtctggagttcatagtttggttgtttgcatcttgaaaagacttagaggaaaagatgatggtatgaatatttaattataaaatgtgtcacttttgctttttagtgaagctctggtaatgtgaattcttttgcatctacagtcattaatgcgggtgtagctggatgttgcactggtcttgctctaagttttccaggtatcttttatttatttatttaaataaattgataagtttgtcctttctttgaaccttgtaagaaaaaattaggataaaggacttgtcaatctgactattctgaatatgcaaagaaaaaattaggataaaggactttttaagaaaaaaaaactacttaccccatcgtccagatgctccttactatatagaaggtaaggaagagggatattgtacgcaatcttattcttgcatatgcaaagaggttgtttccagattcgaactcatgatcaacaagtcaccaagacacaacttgactgttatgtcagggcttgtcctcccccaaaccatcacctaatatggagaggaggggggaaatttgctgatgcagaatgccttccaataattgctattgttaaaattcaattcattgtttagctaaatacacgtgtaaatttcattttgtatactttttgttatcaggacttatattctaggattttacaggtgcaccacaagctcttatgcagagctgtctcacttttggggcattttcttttatcatagaaggactaaacaagcagcaaccagcacttgctgttcccacatcctggaaaaaacctgtgcaacacaatgcacgttcgcctttggtactgccccttcaactctctcttccagatgaactaaaagatgcgttctcctttttctccgattctttgaagaagcgcagcaagggaccttatcctacatctcgataagagattggggtatcgtgattttctagcatcatgtagataagatgtgcactctttgccttttatttttgtaggtttcttgtagcggttatcaacatttcttttttgatgaacttaagggtgacaacaaattgtcgaaggacatgattatttacatgttcgtggtttgttgaacttggattatgatgactgatttaggttgacccgtgcacttactaatataataactgttagtattaggtgacagcgatatttgtttgaaagttaaactctgcaattttggaatttttctggttatacatgttacatttacaaatttatgatttttaattagaaaattatgtttctgatcttggttggaaatatacttcaaaagcatataagcacctagtccttacttgaatatccatttattctaacaacagcacatatcttatcaaacttggtacaaatgcaacttgattacgtgattgaaatgtagataactgaaatctaattaatagtgtcaactacatactacatatactcaagttgttagcctttcaaatgaccaccacaaaaataaacaaagctaagttattttaatagtgatgtttgttatcaatgacaatttcacgttcaggtaagtatctgtggtccatagaagacggaatctgtcgcggcggcatatgtttgcggtggcatccccacccatagacggaagctctttagttgattcctttgtaaaatctaatttgtcacttagctgcaaataaataaccactcaaattgattcctttgtaaaatctaatttgtcacttagctgcaattaaataaccactcaagttgattcctttataaaatctaactttgtcactaaatacttataaaaaatttctattaacttattttatgttggtcttcaattctcttttattccatctcttaatataagaattatgtatccgagctattatctaattttaacattgctatgtggtaaatttaagtttgttttcacttaaaaaaaattgggtttgtttagaaaaagatttttatatacatttataggaaaataaaataagaaagaaaaaaaaaaactttttctaaactaatttgtaaaagttttcatattagttttttcaatttttttaactttcctctttttagtgttaaggtgtgtttgtattcattttaaaccaggttgaatgtgaatccaatatgagaggaggattcaatgtgtttcaagaagttttttttttttttttttctttctaaataacaatcctatttaagttaaacagttgacaaaaactttcatttaaagtaatatgcattaaaacaaacacattattagataaatacatgttcctacatgaataatttataatcgaaaatttaaaactctacattaatgttccctcttcataattggtcatagttattttataaatactactttacttttaaaacattatgtgacattagtcgttcttatttaactaagctacaaggtgtcgaatttaagtaaattcactcttaaattattttataattaatataaaaacttacaaattattttatttattattaatgattaaaacttcatagtttaacatattataaatacatgataaaatatttacaatgaataatattttaatagataatacaatataatcaataacacaaacaagtgagtgcatagattatttgatacttatctctaggttgacattaaatatatggtaaagaaaattatgtaatccttgataattttatttacgtcaatccgaataaaacatggcgtttatgtttggattggtgaggagtaccatcgcatgcagttgacaatcaaagagcattttcttcagaagagcagaaatcaacttattttttctgcaatgaagtctgatgttagctattagagagggttaagcttctttcgtagaaatgtatatcaagcaaatatggttgctgcagttcacgcatatcttttggttgctgtatgcataatattatcatgcaggggttgggagatattgattcattttttttatcatgatatcactggtttgtttcatgggtagggatgtttgtttgtttgtaaacttttggccaagttgtccacatcttgtgaggctgggagttataattagtcagtttacttttgcagtttttaccaaattatcaagtttattttgtaaggagacaaacgaattttacagcttattacctagttagggcagcaaattcgtatgttgatttaccaatggttgttgctgaatagatccatttggaaataatataaatatcttttcataaaataaataaattaaatgtaatatcgttttcacttcctaaaactgagcatagtaatcaacaacttgagcctcatttttttttcctaataatgcaactttatttatttaacattaaattacatgaacatatatcaaatttaaataattaaaatgtccgtaagttttaatcgtgatagtatatggatagagaaaatataaattataataccaggggtacttatcaaattaattccacaagcttgttctgtattagtcacttaatggatcaattatatagaaaaaagatttttttttcgttaacaatcacctcaaatcattattaataaaagggtaatatagttgtaaaacttttttatacctaaaataaaaggtactttatgtcatactcggcaggtaatttgtaatttcatggaaagtcatgtaaatgaggttgatggtttgttcactttgttctatccataagattagaaaaacttttattcaacttttttttttttatgtcaattcacctatttttatttttcaaatggacccttgtcttttctaaacatgttttttgatatatgtcttttctaaacattaatatatataataatggaaatagtaatatgtatttttataaactctatgatttagtaaaatcttacgcttacttaattaaataagagtgagacatgaaattttatcgtgaaagttttaaaaaatgttaattatcaaagaatatgttggtattattcctttcctagcgctactctttcgatttactaaaatggaaatgaatggttagataaggtataagaataaaaaggtttttattaacacctgtggatttaaatggcaagaaatttggtttatcttgagtaacgtgtcaggtttttttaaaggattataacgagaagtttaaaaacaataaaaaaaaaaaaagaagtaaaaataacaagtttaactaactagaattttaactctgcttttaacttactacatctggattttaatttacgcatacatataatattgacataaatataaaggtaaaagggatagaaactcttcgcctaattcatacattccaatatacatcagaacttattttgcttcccatctttcccaaatcaaccaacaaatgtgacattaaataaaatcaataatcaaggctaattgcactttcagacctccaatgtctagctttctcaaatccgttggtatagttctcaaaatcatcaattgtttggtcaatctcttcctgagtattcatcacaaaaggtccaaattgcaccacaggttcacccaatggttcacctccaaccaaaatgaacctaaggaccttagaagatttgttccatgcctctaggccatccccaggaccaagaagaagtatatggtgagaggttacaagttgagacttttggtttccaaatacaccctctccttccaatatgtacacaaaagcattccaagactttggtataagttgttgcaagtgagcaccaggtttaagagtaaaatccaagtacatggttggtgtccttgtgtagattggagactttattccaagagcttcccctgctataactctaactttgataccatctatcatagtttcagctatgtccttgctcaacatttcttggtaccttggctcaatcctataagataatagtacaaagacatattaaaccaaagttttagagtctaaatgaagaaactactttaccaatttaacgtaaacttcaaggtagacaataaatgcttcttaaaggataacaaataatacttccaagaagacactaatggaaaagttgaattcatttttagtggggcatccataaccagacaaattttgaactagcattggcaacatgttattattgctcttattattgaagcttccaccatcactataggatatatggggtgagaggcacattctttatgctggccatttaagtcccttttgcacacttgcatcttttgatgccctatttaagagcacttctaggaaatggtacatgatggcgaatcatgaggaaaaagtcacatgtgaaagtaaggaaggcatatcttaattcagaaagttttaaaagatttgactgtttctttgtaaagagtgaagttcctttcggtctcgttgatatttggtgatgaggattatccaaaattatcccccaaaccaatgatgatgatgatcttcaatgacgcagaaagtacgtcatctaatatggctaagattgcgatttgagtatttcataaaaaaataactcttggtcactcttatttggagctttttacattaaaaaattaaattctaggtataaatgaattacaggatatctataaaaaaattatttaatctatatttagttttgtgtccactccaaaagtgcgtcatcctgaagcaaaaaatagtaacttttgtgtttttttcattcatttgaaatgattttgttgataaacatatatatatatatatatatatatatatatatatttgatgcttatccaaatacacttacaaaaaagacttatgaccttttgtaagttcaacaagtacttaattaagttgtttaatatttatgaatttttgtaagggcaataagtatttaattaagttgtttgttgataagtgtctctaacattggtacagaagaattgtccacttacattttatgttttgaagcaagattgatccacagctgaagacccttttgggttccttgagctgcaggcatttctgagtgaactatccctctccctgcagtcatccattgcaagtcaccagcttcaattgttcccttatgtccttcaaaatcttcatgcgttacagctccctaaattgcgcaaaaaagttgcattcaggtgaggctagcacatcagcacaagcatatgtgaccaatatatcacgtacacaactttagatacattacattacactcaagtggtagttggcattctagaaaagcaaacaagatatcaacatgtggggtcactcttgtgtttgtgcttataaccaactactatttgcaatcaggacacaatcttaaatggtatggttttagtggtcctaatcttaattggtaacgaatcatcaatttgtgacttacatgttgccacaccaccagcacaaagattaacaccatattgagctgatacttagctcaattaaaactatgagctaatatagaataaagaaatcataaagcgaaatagtatttagtttacttttaatttttcgtttttcaattttgttgatttgcataatggccattatattatatgcctttgactttataacacggattggaacaaaaaatgaaataactcaaaacgtggtttctctaatgttggaaaacagttttatattataatcaatgatcaaaggaggaaaagcccatgaactaaaacaataaatatttgctctacctgcaacatgtatgtgaccgtctcaaatcctgttgaaaataaaaaccaccacaaggaagaaacaagtcagaaactaagcaaatcagatcattgaagaacataaatgacacagaagattcaattggcaaacctctatgtggatgatcaggaaacccagcaggagcagtcactgcaatatttcataatttcacattcttagaatacaatacaagattgaccatcatactttttcataatccaaattaaaaaaaacagaggaaaatacagagatgcccacctgagaattcatccaaggcaaggaaaggatcaaagtacttgagttcaaatctgaacatatatacccacaaaaccaatcaattcaaaaagctcaacttttaaacaacttgcaatactatacacatataaagttaatctacacctttcaaccttaggatccaaattaatcttagttaaatataatcataactatgcataatggctaaggctaagattaactgtgttatcgttgatctctctttaagtcttacctccctatgcttcttctaacaacggctccaacaccctcatgctgaggtctggccaagaactttctggctacaagacaaggttcattaatgcaactgcaaatagcttggtccggcattttatgaaagaagtgcaaaagagaaagaaagaaaaaagtttatggaatgatggaaatgtgaggagcaagacaaagattgttgaaggtatatataggaaagtggggggtgtggcgtgagaaagagaggaagaggttcactcttggaaagtcaaactcaaaacgttgaggtcatagcatagaatagaataagagtttgcttgagctgaaggttctttttctttccttgttcctatgaacgtcagcataacgcactcatgatgtgtgatgtagtgtgctatgtttcataggaataggcataggacttaggaattttttgaattcatatagtatgatatagtatcttacttgttacatgattaccacctgtcatgttgaattgtgtgattttctcttcaaatcaaatttaaggctcataaatatcatataaaggcagaagagaaagagaaaaaaaatcttgggtcctagatggatttgtgcctctgcatcatcacttgacaattgacatcacccacgtttcacaatcggttaattaaagtcttgacttgtttttaacaaccttcgcacttcatcattttgttctactttacaattttcggggaaatgggtatggcctcttttgtttgtctatttactctttcttataattttttaattaaatttaaatggttcaaaagttgagtacttttttctttttcttttttttttctttttagttttattctttgtcctatactcggtgtcaaagtattaaaaatattcttttcgaatctctttgttccattatagatgaggttaaggttaagtttgaaagaaacaaataggtaaattagttgaactacgcataaacacttaataataacaaaaagaaattatgagttaaatttaattctcaaaatgaaaattcttcattcaaaaataaaaatggaaatatcattagttgatttaataattaagcttctattaattataaataaatatgttgaactttggagcataaatttaatttaataatatttcatatcatttatactaaacaatatctggagcatttcaaatgattcgattatacttaaaatgtgatttgagaataataatttttttaacgcgaggcgtggcttttatcatataaatatattttaaaaaaactgcttaaccatatttacagaaaaaaaatataatcgtaactaatatgaaataattttaattataattttaatttctgatgtatcattgttctatatgtagtacaaaaaatgatgcaaaaagttacttgtgtggttaaaaaggttctcaaatcaaattaatccccatgtgaaaaaaaaggttgatttatgactaaaaatgcaagacgaagtaaagtgagatatgggtcaagaaatagtggtccaaagcgtgtttggtgtaggcgattacatagagaaccatctttaaggagacacaagatagtatataaaactttaattattagtatatataattatcgaaataaaaatttatataattaaatttttaattaatagttttcaaaaaataataataatagaatgatagaagataatatgacaagtgtatatgtgtatatatatatattataatatctatacgttttagaatatattatactcctattttagaatatatttttttcctctttcttctcattctctcttaaattttttttggagtcaataatcaaatataagcagggttacgaggtgtgaaaactacaaccttcaagctcaaggctgagaataaagaagagatcgatcaagataagaagtatagagggaaaataacatgtttatatgctcaatggttttatgctaaataacaacaatatgacagtgaacaaaactataatttatatcacaattgatgattacaaaatattttatatcaatcgattaaaaaatattttatatcagtcgattaaaaaaaaaattcagtttactacattaatctcttatatttcaaacaacaataagtttcatggttatcttcataatcaaattaaaatctagtactttaaaattttggaacaaattgagtttaagttgaaggcttaaaatagcaatcaggtgccattgtttcatacattatatatttaattattagagactccttgtttgttttatagattataatttgtttttttttatacttgatgtttaatgttcaaaacatgttttttttcttccacaaaaaacatgttgcttagaaacaactttttggtcatttaataaaacggaaaagaaagaaagaaattgctattcatactgaatcttaaaatgtttctcttcataattgtttttttctaacattatacaatttctatttagaattatgcatatctagataatttagactttaaagttgaaaatttagagaataaacaactaaataggaatgatgaagaaaaatatattttggttggaaacaatttaaatggagacgatcattataatgaatttaaatattttgatgacgtgagtcttaaaaaaatgaattctttcttcttctttttttatgaaacctagccagcatatattattggacatttttttttttacctaagaacatgaaataatcttataagtaacttacgagattaatcactaaaaatggtctaagaaaatacatcaattgtgaatgatcttaaggatattaaaagaaaaatgcgcatgattttaaataattacgtgacctctaactaataattttagtcaaatgagaaatttttttattatgagaaataagaactacaaatacaaatcactaaataatatttgaatagtcaaaatattcaaaaaagtaaatggtttttttaaatggtcatgtaaccgctaactaacatataatcgatcctaattaaataagaattcttgttattgtgagaaataaaaattacaaatataagtcaatagatcatattagaataatcaatagtaaaagaaaaatacacatatttttttatgtgtttattgaagtctgaatcatctatataattgtatgaactagatttagagtttttatttcttacaataagaaaagtattttaacttatacattacacatgataaatttttatttttatatagttaaaatttatagttaataaatattttttaatatataaatcgtattataaataaaattataataaacaaatcttttgaatatattaaccatatcttggatttagatgaatgttaaacggtcgacaagcacatcgaattatccaagtaataaataaatggtaagtctgagtgtcgaattccacaatgattttgcttgtattcagagttaatatatttttaattttaagcgaacacaaattaagtttgataatttctaatcctaatgcggaaatgtaaaattcaacataaataaagataattaagcataacacaataaagagatagaatacaaacacttgagattgaaatgtcaggtaatgcggaggattatgacgtgttggggctcaactcaccaaaactacctttgatgcaatattacaaatatttctctgtttaattattaaaattgctcaccatcatctactaatgtgttataaccttaattcctcaagtgttaggtcctaaattacctaatttcactcctgatccctcaacaagttccatcaaataatttgcattaagagtaaagatgcaaaatgtaacataggctaaacaaaaccactttatccctagacatgatattatttagaaatgtttttcagttctcattttccaatgcattaaaatcctataacaagcttgcaaataggagattaaaccacaatcatgaataaagctcagaaaaactacaatgatacgaaaataacattaaatagatagttagaatcattacatcaagagtgtttggttgttggaaccccaacaatggatgggttagcctcccatttccatgagagggtttacaaatacaaaagaaagcaagaagaatgaaagataatagaagaaaatggatgaagaggtccccaaatgagtgagatttctaccttcactcgtgccctagctctatctctggccctccaaaagtccagatcctttgcctcgtgcccttatttttccttttaacagcaacccaaagtcgtggtctgtgctcagtgcggaaaggtcgcgctgagcacgccttcattgtccagctgaataagtgaccacgcgctaagcaagctggtcgcgctgaccgggcctgtcgcactgagcgagcatctggcgcacttaacgagtagcttcagacccttaattgtcctttcattttcttgcagtgaaatttctacaaaaacacaatcaacaacttatgaatcaactaaacttaacatctacttgataaaagtttaggagaagttaatttctatattttaatcacaaaaagaagtcataaaagaatgaaaaaaaggataatttacttatagatttacattcgatcagcaattatcaatgaataatttaaaattgatataattaaggttacgtttaactatacacacatgtaatgacatattaagccacatatcaatctcttttttataggaattgtaaactgagaacataggtataggccaaattaaaaatgacatcacatatcatgaatggagaacaataggatggcctgaatgaagaactatttcacatgtaattaaggacatttaaaagctattttttgttgaaaacaagtgtcttgtacaaggataaaagttaaaatttagcctaataaatatgaatagaaaaaatataatttgaaacgtatatataaaattttattttaaaattattaaagaaaaaattaaaataataatcataaaaaaagcttaaatacctttatagtccttataatttaatttttttatccatgtaaatttttttatattttatttttagctcttgcgaattatgtttattttatttttcatctttacaacactttagatatcacttttttcattatccaaagtattatctaaagttatttaatgattaaaaataaaacaaacataatttataaggactaaaatcataaaaataattttataaggatgcaaaacaaaaaaatattaaattagaaagattaaaaagattttttaaatgaaaaaatatggataatctcatccatattttgtttctgaattaaaaaaaaattccaaacatttagcaaaacacattaagaggaaaaaagagtacatgtaatcacgttgagatgtctaaatattatataactttgttaatgctggtacttatttagaaaacacatatttatggattatatttggatttttctttgaaaaactcatcaaattaagttttaagcaaaaaaaaaaatactttttgttacttttgttcaaattatgatcttggaagatttaagtggaaaaaaaatcgattatacgttgagtatgtaaaacagttttattttaacacatcatcacaattataactcactattaagtttattgtcttttattataattattttaaaaatcatagtttgtggtaaaggattccacagataaacttgattattagcgagattttaaacatcattctcgctttataaaccaaatcactgaatttgtacacgcaattatcacttgttagagggatgtttgtgttgtgctattggcatagacaccattattgtggcataagcatgataacaaatactaatgtttgagtcatatctttcatcatcaaccgctcagcacctcatgtgggaggaattaatcaacacgttgaaaaatgggttttatgaaaaatacggtaactatacgaaattcgatgaaaaaccccagtcatcttcaattatgcttccattccatccaaggtaagtacaacaaaataaagaaaaagagggggaaaaaaatgttgaataaagtgatcacttgatcgcggcgtgcgtgtattgttcatgatgacaaacacggtctaagactaaatcccacagtctacactctacacgcaaataagggtttattccaatgttaactatgcaaattaaaagagttttaatttgttcaaaaactcaattattttgggaggtatgttcccactgaatcaattagcctagctattattcaccgacgacttttctttttctctttatttttcttgggtaaattctttaatctcagtttgtatttaatcatttgttaatataatcattcaatgatacattgacactttattgaaacaattaaacttgctaaagaattgttgtgatagttaaaaaaagttcctccgcataaaatacctgtagtctgaaaagaattagtattatctgttttctttgcatctccttggaatcttcagattgcatttattagttgaaatttgaaacttgtttctttcttcttctttatgtggcagtggcaccagccgtgacaaactggtaagcaatgttgggtgcgagaaaaatgacatcattagaacaaaagcatgacgcgtcccataatcgaactcataaattcaaaaatgccatggactagtaaagtccacattctgatgagtaattgagaaggaaaaaaagttatacaataaagtaaaaagagaaaaatgtaatagtaaaatctctcaaggcagaaaactgcaaaagaggaaagtgtatctgttaatataagaagaaatggttaatgtaatatttgcatctatcaaaaaatgatagtgtaaacaatattttggtaataaaaaatcataatgaaaattaatagaactttaaaagaaaatttttaaatgaaataaaatatcataaacttgaagttgtaaaatatatattaacataaaaaagaaagacaacaaaatatttatatctctcttaagtagagtttaatttattcaaataattgtatcttaatccattgcacataccattgaaatgggttatttacatatatttagtaagtatctagtgttaattatgcatgaaattagagtttgatgtctatgtattgataatgtaaaactgttttacacttcatttaatcataaatcaccatttgaattattttaaaaatcaacaaatttatcataaataattaattatgattaaataattgtgtaaaacattttacactaacaatacataactttttttttctcaattactcatcagaatataatatattttcatactttttcaaccaaatcccatatgtcatatattattaacattgttagtacatatctcaatttttcataatttttttataatatattttcagtcctaaatttttttctccactgaatgttatttttagcctttttatatattactaacaacgttttttttttataattctaataacaaatttagttacacattttatcactctcaaagcttttactttgcttgcaactccttaagaagagaaacaaccttaatgtgtagcaagaggtgaatggtaacttggtaaattaaaaatactttagtataattttaattaaaaatatattttaaaatattttaaagaatattctttaatgatattaagttaaatacactaaaattaaccccattaaacattatctagatatcatgttcttttcaaatccatacattatttataaaataatattaacaatatctttttaaaaataaatattaacaatatctgtaaccgttactaataaactttttatcaatagtagcagttaattatatcttttgatgcctgaaatattttttgcatatctcagcatgagctgagaataccccttggcagttggcacacgtatctgcaaaaattagactatattaaaatatctatataaaatgataagcacaagtattagctatcattatcatgattgccctactaggaatcagtcactagaagatatgaattatgaattatgaagcttgtgccaccaaaatcggaaagaaaacatctaacgtgataactgactatatgaattatgaagcttgtgccaccaaaatcatacccaactcaaattgaaagtgcaatttaggagtaatccacatactttatgtcttcttaattgggcatatatatgtttctcaaatccacaatagttcatataaaaggagaaacaatagtgaattattccacttgtttaccataacccaccatacttggccattattgcttccaatgctttgtcgaagcagggtttgtaataaggaacacaatgattattgctatggtaacaaagagatagcgtaatgacacccctcaaggagactcctaagtgggtgtaagatatgcaatcttcttagtttctagtttctgagtttattagtataatttaagagtctgtttggatgaagcaatttaaaattataaagaattttaaattttaagaatttcaaatgcttcaattgaaattctttcattttcaaaattctgtgttaggataataaaattaaatttcatcattttcaaaattttatatttggatgaagaaattaaattttcagcatcgttcaagatcgtgaacaagtgccgccacacgatatgctcaagattactctctctagcaccatctcaccgcctcatcccaccatcagattcaccctcaagagaggcaaatcaaataacgtaaaaatcctgaagtcttggtcgggtcggatatgggcacaaccctctacgaccaagactctgacaaaaaattctcttgcgccattgctgattgcggcttcggcaaagtatagtgcgttgggctgggtcaaacctccgacgacattggcagagttcactctcaatagtgccaatgggttggacttctacgacgtgagtttggtcgacggttacaaccttctaatgctgattatcgccaaggacagcaccaggtgcagcgccaccgattgtcttgcgacttcaacggcgggtgtccaatttcaatttcaatttcaatttcaatttctcactcttttagaaggaaattaaaatttcacatttttagttgtttaaaattatattttaaaatttaaaaaaaattaatttcttaaaaaaaaaattcaaataatgaattttagattattttcttttaattatctgaatttattttactcagttgaaattctctatctaaacggacttgagaaatctcaatagaaattggcacaattttaaatttactcattaatagcaactgcaattaatcgaaaagatgacgccaaaaaatcttctatggtagtgtagttagtgcctgttgaaatcacgaattcaaaatccagctaaagatccaccattttgtttagtattgtcaaatcggggaaaccgacccattttgtgccactcattgtgagtaaagtcaaatataatttgttaggtgcatgtatcgtttaccttaccgtacacatgttacaatttaacaagtagtcaagtactcgtttgataatgttcaaaagttactaaatatgctttaaatttaaattatttttaaaagacacatttattctccatgaaagatattttttctcgaatcagatcatattactacatgctgaaagtaaaactttttctttaagtatttagactatatatagtcaaaactcaaacacaagagacacggattaaacaataataactatgcaccacattatctatgtgtttagtggttctctaattttaacttgttgacattaacatacatttttttttatcatattataagtataaagtatccattaacaaaatatttaatatatatttatataattatgccaaaaatgttattttttaataatttattttatttaatacaaaacaaactaatttgcaatattagatctaatgtaaattactattatttaagttttttttttttttcaaaacgatatttaagtaaaacttagtagttgtacaaattttttgacatcttcaaacttactaatcaagccagctcaaaattggttccggttgaattggatattcagtatcgctatttgttaagtacatttagaatcagaagggatagtaaaaattgtttatattgaaacaatcaaaccatgtatatgctctagatagttttcgggaaaattgttaatctaatgccaaatgcaccccaacaagtattaaatataaatatatcttacaccaaaagatacaaaatacacatctaaaaagaattcatagatatataccacgcgggcttttgtgctcatagtatccaacccgagaagcaattgaggaactaagaatggacaagcgtagctacaacaaataagattgaaagaatttgctccttttaagaagaacaaaaaaaaatgtggattgttcatctagtctgaagccaaaagcttcatgccactcaaacctagaagagatgtggaaaatagagggttgagaccaccaaaagcaactttttctccattttttttttttttttgttttttcttagaaggaagtttagagatgattttactcaaagcagaagaagagaagctataaacacagcgagagtggacaagaagaagcagacagtgaccttaggctgtgaatttccctgtggtgatttggttccggcattcgggctggaagctggggctattttagcaacaggaggcaaaggtggctctgccacttcagattctgtcaagggtggaaacggagcctcggctggaggcaagaattctttggtaatgagtccaaaaagaccacctggttgaacaggttccatgtaagtaggtttgttgtcacccaaacctaagcatttgttccctgcagtagaacggagaaaaattatttcagtaaaaactgtttatattgaaacaatcaacccatggtacagcagaatttgctagcacttacttctgtatctgtcagcagttttagggaagtctgtgatgataccatcaatttgtgctccctcaatatatgagttgatctcaacagttgcatctgagaagaaatcccatgcttgagacacaaactcattgctgaatgtttctacaaaaactgagaggttagcattttttagctttggcacaatatttgtataggccgtcaggaattgatcattattaggaattacggagtccttgttgacaaccacagaactagcaaagttctttatatcctcaacagctgcatttgcagcatcaccaacagtctcgtcaatcttgtacacaagctcataactggttttctccttgaacttcagcagtacagaactattagtggattgaatataaaccttttgggatcctggtttatcataacctgctttgctcaaaacatcgatgacagcatcaatcacacttaatccttgcttgtctgcaagataggctgcattctgataagaagaacaacaacaacaacacaatatacatgttagtaaatagaagatgaaagaaaaggaaaaaaaatcatttgcacacaaggaacatgccaaataattctttacttggttgaaataaatcagggtgaatagagtcagtgaagaaatatttgatgttaaattcacacgagtttggcaggtgagtcattttgtttttggtttcaaaagagaaagttgtcagctgcatgaagtacaagtagaactccaaagagttaaaaacagtatatttcataatttttggccaacaaaaacaagtgagaaacaggtcttgtaacaatttgatagaaataatgcatgatagtcttaatatttcttatttctatttcccctcttattccaaggtgaaatcattcataggaattattaaataacttaagtgaccctaagccgttctcacaaaaatttgtcctaattcttcaaacaaaattatatgttcaaataacagccggtagaatgaatactacaaaaagaatgaataggcacggaagcacacacctcaacaatgatagcaacacctgatagagaagtctgattttttgtcaaggacaagaaatctgataatgccaacaatgtcccagcattcttagattttggattcctgaacaatctgtattttgcaaaaggattcaatattgaggctgcagggaaaatagagaagagaaaaatatgtcaaatatttgttataacacttatcataggcagcaagtgaaaggcaccaaaagatatgagagggaaaattttgccatggtaatttatcagtgagacattaattgtcctataaagtgaagttgtaagctaatttccccattattcccaaaacacgacttgtttcaatgttcatatatctcattctgaattttggctatatgacgtatcagtcaactaagctttgacaaagtagggatgccaaattattgattccattaggctttttgcttcatgggtttggttcttgtccccccatctgttgtttttatgttcctcttctttttggttaatatatttccagtgtgcagtaagtgattgttagttgctttggtgccaacatagttgggattaaagaaactaaagtgatgcatttgcatgctgttttgtttaaaaaataatattgtgattttagtccccctagtttctcaaattcatgattttggttccctgaattttaattcatagtcttataaattggtgattttggtcttccagatagattattaacaaataattatcattaattgagttattaaatcaattataaattaatcaaaaccattaattattaaaaattgaataaaaattattaatcctaattttctgcaacactgttcttcctcttctctgcaaatacctcttctatctccattgtgtcgcacgcgactccaccagcagtaacaccacattaggtttaatagtgttttatcaaagcctttttaatgattaataatttttatttaatttataattaatttaatctctctaataatcataattattaaccaaaatcacaaattcataaaactaggggaccaaatgttacaattaaaaatcaaggggaccaaaatcatggatttggaaaactagggggaccaaaattgcaattcagccaaaataataattaagctttgacaagtctggattaactccatgcaaatacagaaataaatagctaacaactacagaactttcagacttacgggtcaagctttttatatcattccatgtcaagttgaatgcaaatatgccactgccagatttgatctcggggatagtcatggcaaatttgctgaagcttgattgggtgactgttgtactctctataagatcaatggagtttaagcaaaatggtgttccatccttagacatttgaacaggacagtcaagaacatccacaccatcagatatggccttattatatgctaagtcggtacaagcaggataatctccactcgctccatattttgagataaccaaagttttatctgaaacatgataaaaaagtgagagaaacaaatcatcaataatgcaagctatgcttccatcgaatgataaaaatcatacagtcaaacaactagaaatcactaagaacaacatgataatacatattccaaaatcaaaacaagttaccttttttcgtagcattggtgcctaggtgagcaaagcaacctgcattataagaagacaacacagtatctacttaaatagagaaaaaaaaaaggattggaaacacaaacatacagacatgttctgagattacaatttataagtatgcagtaggacccacaagcgactaatatcaactacatgcttatgtcttatgcttatatgatgtaaaagcattttaaaattgagaaagaaaattctaattaggatagctaataagaatgcaatgcctagaaggcaaacatcgctatgtgctttcatgcagcatgacaaaatcttttactatagttgattaaagagtatataactggaccatatctgatctgcctaaaggagcctgccctaagctgaatttagtttacagtgggagcttgaaagcaggaggtggtgagagattggctaaaagtacatatttttagtaactttgttcatgcacttgcaccagcattcggacatgaaatcctttagtcaaagtcaacataaatcccatctgtatccttccattgattaaggattgcataacaatcttagtggcatactcatgcaaagtgaaagtatctgcttacaaagattggatagtaaggataaattagcttataaatatatcagttttgggcagattgatcagtaaaacaatttcactgaggattaaaattgaggatttgccccatgaagtttaaacaagccatccgtggccactctaaaattgaaaaggcaagcaaatgcaagaggcacgtttaaggtgattcacacaaacactatgagcatgagattaggaagacattaggataattttatttaatggaaccttatagctgcatcaactccatcccaagggacaaatactgtatatagtaaaaatctgaaaatatatgcaaggatatgtttggttggaagagtttgaaggggaagtgatgacagcagatttttcatttataaaatgtttacaaaaacgaataagtgatgattggcaagttacactataatctgattataccccccccccccccagttctgttatttaagaaaatcttaaataattagaatgtttacataaaacaaatattgtctcccttctaaactcttgcaaccaagcataccctacgtctacgtaaacaacattttgataaaatcaaatgcattctaattgtggcaggctattctgataacatggcagaataaacaaataaacagcttacctatagcttcaaatggagttatgggaaaatcagagagcacaccatcaacagagaagtcaccattgtctacaaattggaggtactcggcaagaggatcataactgtaattgaagctagatggaacatcgttcacaaaatctgatgcaaaaacttctagccctgctttatgtgcatctgagaccaaagatgtatgtggttgtagataaagagttgcatgatctacaggccatatgtatccctttggaacaagaattccagaagcaaatgtcttgataaatgtaagattttttaaaagcgaaccataagtccgattggttgatggatctacatcactctgtcccataaacctgaagaccaattttgttgtttttgggttgaagcgtgatgctatacttctcagaaaaccaacctcaggtgatgagatataactgaaaactactcttctagaaactgaaatcacaaagcttcgcatactcaaattgtgttgtgcgtagaatgcatcatgctttaaaatataagagaaaacaagagttagatttaaaacaaggagactgaatgatgagaatggattatgcattcattctatttacctgaatattcaaccatattccttttggtttttgcgttaatttaactaaatcatcaacagtaagaattccaaaattgttgccatcatacaggttggatcgagagtatactccctgagttactgtccagaaacaagaaactgtcagcaactatataaagaaacaacttccctatccaaaaagaaaaaagaaacaacttcaaagctcatttgcaagctgagacagaaaagggtttaaaaagatcctgattagaagctaaaccttaaatcaacaacacatatatacaccgcagaaaagaatcactcagtccatcaaatactgaaagtttataactattaggaataaaactacatgtttgaaataaactaaactcacagacaacactagataggtccttcagagtataatccagaggaaaatagccacgggtgggtacaccattaactaagtaacttgtggttttatttgggtaagcggttgcaatgtaagtagaatttgcaaggtttatatctggctggcaaatcccaactccatcttttgttaattgcacatcacaccatatatagacatctggtccactcgttattactgccaaattataggcagcatcactggaatcaggaagtatccccgaaaatccaccacgtgctacaaccaacggcgcacctcctgcaaaacaagtatacaagtaagtttcaaaacacctaacacagtgaaagttcctccttaaataataataataataaaaagtgcaaaagttattcaagaacatattctaaaactgaaagtggcaacagtctctgatattatatgaatcgtattcagtcagcgattggcctttagatttcatggaaaaaattgtttgttgaagatcctacatcagactaatgatatggcaaaaaagagtgtataaatagggggcaaccctcatttcttaagctagcatttaagattgaatatgacaacccaaattctaaattctaaaacaggtattggagctgatcctagcgatcattgttgaatctattgggtcaaccgttaagtcatgcaagcttcacatcgaagatgtctagtccttggcgtggagaaggctagctagcttttgaggttgagttaggctcaaacccaaattgtaagagttgaatccgcaaacagttcattcagccaaaactttccctgacaacaaataactaatgtttccttttcacatatgatattctcagattaagctctcgagaaacgtcaaactctttctaagcactgcatataatatctccatagaccataaactagctcgaagcttagctaagccatttatccaaatccgaactcaggtcaaagtaacaaacgaaatcaaagtttacaaaaaaaagaaaaacacagatcgtacacttggttagtgattattaggtaagtaaatagtaagtgaaaagagacagaagcaaagatggtagtaaaacacgagacattaccgctgagagtgttccagatagatctctgagcagagacgagagaaaggagcgagtgaagaagaagcagagcgagtggcgcagagagagcgcgtgaattccacatcccggcaaccttggcacttggcagattaagaccaggagcaagtgatgaacccaaccacctcaaaacttttagagagagaaagtgtgtgtgagacaatgaggtcttaactcagcagaagaactttttctgaagtggtggccttttagtattttctttcttgcatttatcattgtgttctgttgtgtatttacatatatatagtattatttaaatttttttttcactgatcaaatcttttcattcataaaatttgaaaacaagatctttaaagactgaattcactggaaccaatgactaattagtgttgttggaggtattaatattgtagtgttatttaatagtgtagtctgaaaaatataaataaaagtaaaaaaaaaaatgtggggcgaagtggacaagctggcttgagctaagccgcggttttgactgatgtagtatgtggtgcggagtggggtccacaacgtggttgtcaaactctggcaaggtatacgtggcgggctgtgattggtgctgaggaaacgcacaaaaccgcaaggttctaagatcatatttggtggcatcttcaactatttttgttagactatataatgttaatgaagatcttttaaaaaaaaattatttttttagtagtagattttattttaaaattattatttttaaaataatatatagatattaaaaattcttttaaaaaacttattttttatgttaaaaatctattgacttcatttattaaaagatatagtaaatatcatatattgaattcaatatttaatagtaaaaatgttctacgtgggtgtccaccgtagaagaacaacgtgcgaccgtgaattgcgactctgatttgatggtggtgaggtgagggtgagtgggtttcatttcatttttgatgctattgccgagtgagactgctcccactgcattgcacacttttattcgttctttttcaagtactttgtcaaagtccaacatgttcagaatatatgtggtattagatactacagttactcttcatcaccacttttgattattacattaaaatctaaccatagataagaacatatatctcgtttctttctcatcttcatgacaacgagtttgtggtcattaatttgaattgtgatgatggacctggtccagttgcataaattaaatgatctgtctatgtttggttttatcgtgttatgacatattgacgttgaaaactcattttgaggccatgactatttcaaaaggccaaatattacttaattattttagatttgtctcattaatttttattatttatttattaagcagtgatatacatataataatttttttaatctattacatcatttatttttttttcttctcttccgaaatttctctttgcatgcgctgaattatatatatatgtaagagtattcttacccgtttttttaatattagtggttagctcaccaaaaaaatatattagtggttagctggaaggctctttaaatgttcgtccttaaactagagaagaaaaaagagcaaggcacaaagtatacgttgcaccactttctgaattgtaatcctccctatccatgtggtttcaatatatatatatatatatatatatatatatatatatatatatatattatatttaggggtgtgaaaaagaattaattctgatggaatcggattgtaatcgaacttgaatcaaattaattttttctcgacttagtttaagaaaaaaaatagtacactatcttataaaactattttgattaatcaaattgtttctataaaatcgattcggttaatcaaactgaatttcatttgaatatttttttatttgaaaaaaatagttcgaaattggttttatttgttcttaaaatcagattaaaattgattaaaagttaattcgatacatagctaattttttaaaactagattgttctttaaacggttttcaaattaatttgactatttgaatataaaactgaatcgattaacacagaccaatttagttcgatttttttaccatactaatttttgcacaccttactattattggaagtaataaacattttatactctttttgataaacttttctttttctttttcaagtgactaaataaattataaatctcaatgaaaagttaatcagtttttcttagtgaattatacgcataaattggataaataagtttaatcaaaattaattaatacatctgtaatacattttgagtatggcataaaggcacctaagaactagaatttcaaggaaatagcaagaggggcaaatctgtgaagataaggtgaacaatgaaagacatggattgtataagaaggaaattattgacgggtagggaattatcagaaaaagacatcgagaataaagaatctaattcgatggttgttacttgttagtgttctaagacagaaacttacaagttagacaaactggagttatggcaacttaaacgagtttacttttcaatgaaatgctgtcattgcattattgatattgcatgcttggccagactaggaattttccttgttcctatggacgaattctctgcaactcttgggttactttttctactcaagttatattaatatattccttttgctttccaaaaaaaatgtagaagtttcaagatgaaaaatcaaacctaaatcccattgacttccaagtcaattctactaatgctgttagaaacaatcttaatatatatagcgttatagatggggtagaaaatggatgtttatatgatatataataaagaaaaagaaactccaaaatagataaaaaatcaaaccattcaaatacctatgcctcatctttgcagacaataacctccaagtcaatgtaacatagtggcagtaaagggaattaatgacacattatagagtagaaaatggaaaaatattagcgcagtgaaaggattagaaaaatgaataatgtttgtttgcgtgagggatgggctcttgcatctagtgtttttaatctggctataaatattcatctttggttgcttaccctttcaaataaattttcctttgaagtaagttagaatggagtcaatgtgatggatggggtggttgtttctgtgtaggcatttgttactcgagtctctaaatttgtgcaacaacaagctacggggcaatattccaaaatccatgttcagccttgtaaaccttactcacttgtgtctatcaccttactcacttgtgtctatcatcaaacaacttcagtggatctgtccactttccactcttctccaagcttcataatttggaaaaattttccctttcgcacaatgatcaattatcactaaatttcaaatccaatgtcaattacagtttctcctgcttaactagtttggacctatcttttataggtttatctgaatttccaaaattatcggccggtaaaagttccaatttggggatttcttgatatgtccattaacaaacttagtggaagagtgcccaattgattacatgaaatgatttcattctattatttggacctctctcaaaacctgttgacaacaccaatggaccaattctcaaggaactaccaactctattaccttgatattagtttcaactcaaacactggtggcatctcttcgtcaatttgcaatgcaagtttacttcagagtctcagcttgtcccacaacaaattgacaggcatcattccccaatgcctttcaaacttatcatcccttcaagtattagatttacagatgaacaaattttatggcactttacctagtaccttttcgaagaaaagtttgctcggtactttgaatctcaatggcaaccaattttgaaggtcttttgccaaaatctttgtccaattgcacagaagtggatttttaaatcttggcaacaatcaaattgaggatacatttcccccttggcttcaaactctaccatatttggaagtattggttttgcaagccaataagttgcacggtcccattcccagttaaagaccaagcatccatttcgaagtttagttatttttgatatctcatccaacaacttcattggcccaataccaaaatcctacatacaaaattttgaagccatgaagaatgtcgtccaagataaagtgggtaacggtttgcaggaatacatggaaacatctataatgaatggaacatacactgattctgtgactgtaacaatgaaagccattagtatgacactcaacaaaatccaaacaaactttgtaagcattgatttatcaggaaacaaatttgaaggagaaattccgaatgttattggagagcttcatgcactcagagggctcaacctttcccataacagactatgcagtcctattccccaatccctgggaaatttgacaaacttggaatcattggatctctcctcaaatattctcactggtaggattcctacagaattaaccgatttgaactttcttgaagtactcaatctttcccataaccatcttgtaggagaaatacctcatggaaaacagttcaatacttttttgaatgattcttatgagggaaatttggggttatgtggagtccaattgtcaatgaaatgcaacaatgaccgtgaacaacattctccatcttcaccgaccttgtggagagaagagaaatttggatttggttggaaaccagtggctataggatatggatgtggaatggtatttggagtgggcatgggatgttgtgtgttattaataggaaagcctcaatggcttgtaagaatggttagaggtcaacttaataaaaaggtgaaaaagaagacaaggatgagaactcatgaaattgtagcagaatgaattagtggatatctggcatggctggaatttgtcttgttcctcactttcctgttcaattccatttctgccttcttcgaaaacaaaaaacttaagggcaaaaagcttatcacattgcattgcaggggagatctgattcaaatttttgtaatatgaatgtcatatttttcatttggtataatttgtttgccttcgatcttgcaattttgttttatttaatacatataattgtcgatattggttatatattactagcggttgttgtatacttttaaaactgtttatatgtaccggtcattgctagaatatttgtgtcttaacattatggaattgtctcattttgttcaagtatttcatttcgcatcttcatcttctaatatagtctatttagttttctatacttgcttctagtgttgtttttcagccaagtacattatctatgtactcaccttaactaattgattttctagttttacattaacaaaaccattagcacaaaaggattattaaagatctccataaaaattctctgtgatctaacaatagaaggcagataagtgttttgacgaaagaaaagttcgatggacggttggactgcataacagaggttggaacttggaagatctgagaacacattttattaaaaccaatctacctgccaatgagaactttggatttccacatattctaagctttgatgtagctttgtccagaatccctttgaaggagtctctagccactctgtcattgatgtataagaactcccaaatattttccctaagttatccatcctaccaaaactgaatttagtgctaatctgatctctaattctccatacttggagaaaaaaagatctttatcttatccctgctaatcacttgaccccagctagagcagaaactgctaaatctctctaatgtgactcccgagttacttgttgccttgctattgattcttttttgttcttttggggcctttaatgtttgatactatgatggaattctcttgaactcttgtttgaaacttgaaatctaaacctgccattatgacatggttaagaacatatttacttcggatgttttcatcccacgtatagcttgttgtctttgtttaatgaagctagatcatcaattgggtttgagtgtcttagaaaaactcacattacttctactcatctcatactgatgcggaaatgttgtgaaggatgcattactatctatattttttaaatattatttattactattattatggtgtttcgtttattgagtttcttctcagaaccaagaaccaaacattttatataaacatatttcaagttccagaggaaaggaataatagacgtctggatattttgtagacatggagggaaaagagtaatgagattttgtattcttgtacattaaacacctttgcaacatctacaacatcaggcactaatacaccacacgtctacttgcaaacttttgggcaaaacacgttgattaaaatgaactgcacctttattggagggacatcagatgctgtcttaaaacttggaagcttctttaagtgttaaaatgaaacaccagacagcaattgaagactaagaggttcttaattgtaatggaaaaatctatagaggcaaggcagattgactagactgtgccatactctccttaaccaggtgttgagcttgcttaattctcaaatttgctcctttcatgagcttctaattgagacattgggctaaggtgtgcccaaatgaaccttgtcttcctgcaataagttcaatgaaaatatactgttagggatgtgcagcaatctgctgtggagatattccaacatttggcagtgttcagtggcaaaggataaagaaaacatttggcagtttaccaagtgccaacaggcttaatgttttcaagtttgaccttttcataagctactcattagcttgtttttgacaaattgcacaaaggaagatgatgtattcttatcacgatatactgtttgcattatactaaaaccccacaaaaaacaaccctattaagtgttcatggatgctttaatactataactaataagagttcatgccccagcctgcagataggagagagagggttggcagaaggaagaggtgaccaagttgccataaaggtggtatttgctgaagtacatttttatttctttgaaatttgatgctttgttgatttaagacctatgctccaatccaaaagtatgaggcaacctgtataaaggatttataatatttttctcaacaatctgttatttccctcacaatgttgacaactcgtgaaaacattgagattttaaacaatgttaaattgtttgtgctaaaaacactaccttgcacatgccgtatgtaattcagtagcatatccatccttgttcttctacaatgcattcctgtaatagttgtcttggaaattgagagaaatattgctgatggggatcatattacttggacttgtttaaatccaagtcataagtgtttttaagagtttttctagtaaagaaattcttaaaaatacttatagtcttgtatccaaacagactccttgtcttgatcagcaagagcattctttaacttaggctccaacagctattgggatcttgattcatcatacttccacccgttacattcattagtcacttgttcactttatcgaatacatgataatgagtagtgctgtaccatcacgaggagcttcgcgaatactgcaattccaacggtgacaaatatcacgggcatgttggtggtgtcaacaatcatgtcctttctcgttgttctgcttatcttccttttcttctccattattatgttgttttctctgaaactcaaaataaaggaatgaagctagtagacgaaattcatgcaggaaagaatgagtttggagactgtaacttcttattgttctttatccaaatattgagttcaattcatggatgtataatgacaataatacactaattgcggagaagagagctacaaaagttttaattaatgtcataaattgtaatgacaataacatacaaattgcaaaaatgagtgtcacgccatttaagcagctcgacccagagtactttggttttagtgacaatttcaatgaacaagagtgtaatggcaccaattatagaaacctttgatgttaaatgagagttattggaagaattatagaaaagaatgacacgtagcaaaacatgtgatgtaaaaaaattatataaacatgcaatattatattttgcaactctaaatttatatatggtaaatagataaatagtcaagtattagaaataagttacatatgtttggataatagtgatcaaaatcaagtcttataattataacatgtgttttattttaatacaataaactgtataagatattaattaaaaactatatttaaactatttaataatttaaaatcaattatatgtaactttaaaacaagcatccttcatctttttattgttttcagcaaagttaacaaaagatttctgataagaaaaacaaatgatatttaatattcttaaggtttaatttttatgtattataagtaaaaattcggtacctatcagtcatttagaattattgttaatttaatttttaaaataattattataaaagttattgcattcaatttttttaggacaacagtgaatccactattcattctttgaccttttttataaaaatataacagaattacgataaaattgaccatgctataaattgaaaaggtagtaatttgcttgaataaaaaattggacacgagatcttatggaatataaatatagcaagaaccttgacaaaaaaaaatgtaataatataatgttgcgtaatgcattgttcactttgtcacaaaccgaatcccagctgtgatgatgaacatgcccgccataacgacgcttgttttttgctgagatcacaaagtcggttccacaaaacaccaaaaaaactatacacctagagaacgacgtgtgcgaagcgtagagcgagttcaagatactctcgcggttaacccacgcgcgcaatctgaaaccaaaccaacaacaacaaaaaataaaaataaaaacaagacagtcatagactcatagcataggacttgggagtcacacggtcggttctcttctctgtcactttgcctacccactaagaaaaatcgatcctttcttctcttccttgcgcatctcttctcttcattcaattcaattgtggtgttagtgaaataataatgaaggggtagttgagcattcaaacaacccataccctcatttttatgtgtgggtatgttctcattattattttcattcactcattaacttcaacaaatgcatacaattactacaatgttgtatctgcttctgcgtggttctcactcaagttcttatctttcttcccttcttcctcgatctcaatcttcccaactggattttgctctgcggggggaggggtaaataactcaatacccatgagacttgctatactttcgttgaaaaaccattggatagatgtgaaatgcgtcataccctttttctgtgtttgatggaattgagcttctggtcattgtttttatgatggttttttttttttttaataactaatccaacgaactctcttatttcattttattttaatcttttgtgtcttatatcgttgttctgttttttttttcttttcctttttaagcttatcttttgtttgtgttgtctgtcaggataacgttggacaggttggtgactccgggagctaaaccacttcttgtttgggatttgttgtagatttggccttatatttgaattagaccgtgtagaattgcatctggcaataggttgttgagtcgtacgcataacgcattgttttgtgttacaaatattcttaagcttttctggggaatttttgtggtttgggggataccatacaatttgtagctttggtttgtgattctccaagatgtcaaaatttgagggtgttattgtctccgatcaatggcttcaaagccagttcacgcaagttgagcttcgcagcctgaaatccaaagtaggttcatttcattgcttccttgtaatcgacattttagtccaatttcattactcttttaaatttgttgtctttcatgctttgtgtttttttttttttttttttttttttttttttttttttttttttaaccttattggacccttctttctgttgttgtagtttgtctctttaaagaatcagaaaggtaaagttacatttggagatttgccgcctttaatggtgaagctaaatgcattcagagacatgtacggtgaggatgagattagggggatcttgggtgaatcaggcactgattttaccaatgacattgattttgaagctttcttaaaggttagtaatttggtgtttttgactttttctttttttaatattactacattaggtaacttttttccatgttgtgaacttataataatgggatattatgtgtaagttagttgtattaatgaaacagtttatgtgccatataacaacattaaatataatgttatgtagccttacaatttattacatttttcatgcaggcatatttgaatttgcaaagccaagctactacaaaacaaggtggtaggaggcactcctcgtcgttcctcaaggaaaccgtgaccacccttcttcacacgatcggtgaatcagaaaaggcttgctatgttgcccacataaacagctaccttggtgatgatccatttttgaaggaatatcttcctttggacccagctacaaatgatatatttgatcttgcaaaagatggcgttcttctgtggtatataagcagggtctgctgattgttgcattttacttatgtctgtatgagcctttaatgtatattggctttgatatatgtcgtgtttaatgcagtaaacttatcaatgttgctgtgcctgggacaatagatgagcgagccatcaattgcaaacggaatcctagtctttgggaggtaaacgagaaccatactctatgcctcaattccgccaaggctattggctgcacagtggttaacattggcgcacaggacttagttgaaggaagagtgagttttagcaatacgcacttcccctattcctctatagacatttacttaggttcttaatttttattctttgtgacattattgtttgggtgtttatgttgcagcctcatcttgttctagggttgatttcccaaatcataaaggtaaatatttgaactgcacatatcattcgtttattgttagtttagtggttgattttgcttatatgtttacatcatttttcttaatggcctaatatatcttttgacttcagaaatgattacatagtcattgttctcttttcctctcaatctcttggtaatttcagattcagctgctggctgatctcaaccttaagaagacacctcagcttgtggaattggttgatgacaacgaggtaataagatacgcattttttttctttaatttttatttccaattaaatcaaattttgatgtttcattctttgcacattgtgtttcaggataactgatgtattttgcatttcattgttgtcttaggagatcgaagagcttcttaatttgtctcctgaaaaggttctactaaaatggatgaattttcatctccagagagcgggttacgagaaaactgtcagaaatttttcttctgatgttaaggtatatgagtataggtataaatttgtacaatgagtattgataagtaaaaaatatatctattatataaggtacaaacattgcataaatgagtatcattgggcccctatatttaaaacaatcagggtacttttagcagatttttgatgttcaaagggcttttacaaatattcagttccctgttggaacttgggtgtctcccagtcctacttgtccttcataatctcatactattcaaagtatggatgttaaaatgtggtcttgaaaatattaattactgctgttctcctccccttaaaaaatctgcattgcaaattttggattttttacttattaaccttgaactgaacctgctaaggcttctctgctcacaacaaataatggttgtttgtaccttgtataatgcatatattttttgtaacaaattgttaatgtattcttaaaaggtaactgtcacatatattattcttatggggtaaatgggcaacatgaccataaatatattcatgtccatacatatacacacacgcacatgcacaccacactttgacagctagatgcttttagtacatatatacttgaataacaatcccgtctatcccacttcatggaatgggagtatctaagtgtgtaatgcatgacatagaatggaaatgtgacctttgaccatgtcatattgcttaatatgttttaagaggttgttcactcggcaaaaaatccaattccaatttttcatatgtttgttcctgcagaattgcaatttcttcaactcccaacttctaagccaatagtgtcataactcatgatagttttgcctctacaatttgaaattgaatcaagctattaacaaaccattatcctaatgtgttcacacccatttatttacaggatggagaggcctatgcttatctgcttaatgtccttgctcctgaacattgcagtccggccaccttggataccaaggatgccaatgaaagggcaaatctggttcttgatcacgcagagagaatgggctgcaaaagatacctgaccccaagcgatgttgcagagggtacttcaaatttgaatcttgcatttgttgcacaattgtttcatcataggtataaaatgaattgcatagttaattttatgcagactatttgataatttaaataaatattcttatgcatgttaatttctgaatctgtttaagtgctgtagttatttaattagtgccctacacattgcaggagtggtctatctacagacactaaaaagatgtcctatgctgagatgatgacagatgatgtgcaaacatctagagaagagagatgcttccgactgtggatcaatagtcttggaatttctacacatgtaaataatctgtttgaggatgtcaagaatgggtatgtgttccttttcttaaactgcatttattatttttggcaaaatctaaatccttgtatatctgtagaagtgtaaatttttaattttctggatctcaaaacataccaaatgatccacatggcacgtgtttatccactgattgggaaaaattaaatgaatgtgttatcaaaatttaatttgttaattcactaagttcttatgtgcttgattccttttactttatgcatgtagatggatacttttagaagtgttagacaagatatttccaggatcagttaactggaaacatgcaacaagacctccaattagaatgccattcagaaaagtagagaactgcaatcaggtcataaaaattggtaaacaactgagattctcactagtcaatgtagctggtaatgacattgtgcaaggaaataagaagctcattcttggtaatctcttcatatggatataatttactcttattttttataaattttttatgaccgctttcccacctatttgttttggctttcaattttatctaaaatatttttttccagctttattgtggcagctcatgcgattcacaatgcttcaactgttgaaaaatttgagatctcattcccaaggaaaggagatcactgatgctgatattctgaaatgggtgaacagaaaagtgaagagcattggcagaacttcccacatagagagcttcaaggttttttccaaaagaaattctctgttttatttgctgttaacaattcccaacaactgtaaactataaaataatgatttatccgtgacaaatttttgtatcaaattttttgcacaggataagagcttgtcaagtggactctttttccttgagcttctgagtgctgttgagcctaggattgtcaattggaaccttgtcaccaagggtgaaagcggtatgattctttatagggatattaaacagatcctttgtataacatgtaattacttgctactttttttcatccctcctaaattggcttaatttgttgtaattgtagatgatgagaagaggttgaatgccacttatataatcagtgttgcacggaagctcggttgttccatatttttgttacctgaggatattatggaggtatgttgcctcttgccacctgagagtttcattcatatttgctacaaaaatttatacacattagtcttctttgaataaacttcataagttcttataagagaaacaagcaaggtaaaataatttaaatttctcccgtaattaaaatcaaactttacacttcagcttttataaaaagttcttttatttaagttctccaaaagctaagtgtataaattgatttaaacttatgggtgaaatttaattcattttatcttattttcttcttctacaagtgtttatgcagaacttcattcaaacaaggccatcatgtaatttggcaatgataccaaaaaattaagttgacacattctgggttcagtttgtttatgatgtgattgattctttgttgatatcatggcaggttaatcagaagatgattctcactcttgcagccagtataatgtattggagcctgcaacaacagactgaagacatggattcatttccttcacctggcggcactgctactaccaccacgcccgaagcatccctggcaccttcggtatgtggtgaagatgaaagttctgccattggtggcgaattctccaacttgagtgttgacgatgccacctctgacaccacagccacttcttcacaacccgagtctgacagcgtttctgtgggagatgagctgttatgagtcatctagttggcatgagatgagtgttaaatgtttttgttaaagggagaatataacgagtaatgaacttgcaaagcttaagaaacaccttcacaatggtctcaaccttcaaaaaagttggggatgaaaacatacctttagaatagtatatgtgaatagtctgtacaaaaatatctttgttctttggagagaaatgcttattcagagggataagaatgaataaagcttagaggggaagaaagaaatgaatgtgatcaattcacacttgtcccttatattgcctttaagtaggttccactactgtatttgtattttgtcattcattacgttatgatggccaacaatggtgaccatttaccgtgtcaaataaacagaaaatttataactagttctcattcattcttacacggaattataaggtttaagctgataaaagcatgggaaaaagattaaatgctgtgtgaatgtctcaaagccttgacatattttttctgtcgatagattcgttaaacgaggtggatttgttgattttttatttttttgcggtataggttaggtttttaatctaccaatgttttgacttatcccactcaatctgtcaaagaacacctgtgaatatgtttttctttttcttttgggatttattggtaattatcatataaatagtctttcatgatttttgtgtttggattgtattagaaatattttaggataagatggatataaaagtgatgataagagaaatataagttttaatttaacattttttagtacattagataacattattgtactatcttgtccttatgtgataaaagttaaatagataatagtggtagtgatgataatgatattattgatgatatcaatttataacaatgttaataataatgatatcagtgtggtgatatcaatctataataatggttataatgacgaaataatgatgataataatgataatagttataataagagtgatagtaatgataatgatgataataaaaattatgatggaaaagtgatagagattatggtaagctagtgataattactggttagaaaaaagatgaaatatgtaaattcatttcaataaattgggttaaaaattctaatcgattttcacaaataacaaaaattgaaaacagattaacaaaagaacctactaaatatacattatattatgttatcttacctgtatgtgtgtatggatatatatcttagagtttaatggttacgtattttcgaaaaaaattggacacgggtcctctcacgttgaaaaaatctggagtgtcaattgaagaaatatacattgttgatcaaaatgagtggacaggatctgttcatacaaaacttagttctcaactgctgtactactttctttgacgcagaaagagaaaagtaaaacattcatttactaaaaaaagtattatattttcaataaaaaagttcttaaaaatacctctaacttatattcaaatagattttatatatttattcattaaaaagaaattacttatttctctgatcgcacgaacaagatgtccatgtctaggtcatggtgcttattcgagccctctaagcatatgaacatgtcatagcatatgaacattgtgatattaagaatataaattttctattttatataaaagagttttaattctatttttttacgtttcataatgtttagtaaataatttaaattttctacccgtcagcatgtgcacactaaaaagaaggagaaaaaaaaatcttgaccagcagatttaagaatagaaatctgtactatgcgcgatggtccgaatggttattggtcgataacaattaataaagctgttccattccacaagtgccaccaaaatcattgggatattaagaattcaggcgagaaggggatcaagaacaaagaagaataatagaagtatcaaaatgtatggaaatggaaggagaaatgaaggtatgggtttgaatcctagcttccctatgttactgttatttcatatcatgaagggtccctctccccagtgttgtacctattcaccatcctaccccttcaacccaccactgtcctcccaacaggtgtcactgccttcttcatcacttgggtcaccaactccaaactcctcctcttcactttctctcctttgcatgcctcccaaatagactcaccccaaaaacaaaacccatcaaaatcaaaattaaaatttcatttcattatttttccaatcaaggccttgctttttggtctctcactcataggccttaaagaccactacaaacaaaaacttcaccctacaattattttgggcatatattgcaccctcatgtatcttttaatggatgttgttttgggactatgcaacattgtggtcaatgcttgcatttgggattgagcttcaattgccgtcagatgacccttatttgtcaatttctttgcgtgatttcttggggagaaggtggaacctcattgtaacatataccctgcgtcacaccgtatacaatcccgtgaaatcattattgatgtccaataccatgttgggcccccagtgggcctcggtgtcggcagtcatgatctgctttttacatcatttaaatttctaatacactatttcataacagtggaataccaaaattatctttggcattttctctcatatgaatctacgtaattcatacggattgacaaatccgtaaaaaccttaacttataagatagtgtaaaactgtttaatattattcttatataaacattaaacacttctattattctcaattattctcaattttacttttccaatttcattgtctcgcgcattaatcagagagcatcacggtgcatcatactatacgcatcatattataccccgtattatttgaaaaagacgtatattatttgtttacagtttcttttttaattttatttttcgacaagtaaacgattgttgctcttcttgcacgttttgcacttactaattttgttttatgtatgaatatttatctatatagaaaaacaagtgaaatatagtcactgcattcttttgttcttagtttattaatttctgtcttacctatgtgatttctttttaatctcgtgacgtgcaggaaaactgacaaatggttaaacttttaagttagaggaattatttagtagtttaatattatcataattttaacttgtcctttttatttatttatttattttttggtcgaccaatattaattgttaaatgttaattttttttgttagtgaagagatttcaacccacaacctcttcttcttttccttccttatctttttttccttttaccactcaaccaatcttatatctcctcaaatgttgatgtcctattcctatatcaaaatacaccacacacattttcttcatttctatttctatattagaaatactgatactaatatctgaaattttaccataatcctatagactatccgtgatagtagtttattttggattcgagatttaattattaattgcttgaaatttcagatattgattaaagaatgtttaatataatactgatatattagatatttttcatttttagtataataaatattttttttctagatttgttggcattttaatgataaggaaagttatatattaacatagagtgcagatcttctaaagtaaaatatttgataaagtaattaaattgttggctagtttaatacttaaactataaacttgaccacaccatatccattctttatatatactatatttattccatttttattgaccttattatttctcctattttactattgttattgagcttttgtgattcaacaatcagtatgtgaatcacttgtaatttgctatataatttataaagggtaacgataattgtgaaatatttgtaaagtgtatttttctcttcaacatgaccgtatcttgctgcttaacaataggagaggattcacattcgatgcaagcattaatcaattgcaaaagaaaacctattcacctcgtgctaatttcggttacagtttactaaataaaaggcttcttttttcatttttttttaccatctgtatgtatgttggctcttatggaaaacattataaccggaaataaataaaaaatccatgtgacgtcacataattcatcacgtttcttataattggtaatgaccatgattgcatgaaaaaatcctctcatcaatttttttttttataatatagtaaaaccgagatataattttcttatttcatcaaaatacttatggaacgaacaagggttgaatacaacaattgtaacaacatgggataatgcccgcaatggaagatgatccaattgaaacgtcattatccaacaagaatacatacagatccagccagagaaaatactgaattatttatgagagctgaaattatctcctctccagcgtctaactagtgattcacattcttaagagttgcatctgtttatacagaaagttattcaccctcactcaagataggtactatgagcggtttcatctgtgctagatatacaatcgcccacctgatatagcaaatgaagaacaaaagtaagcaaaaagaaatggaaaataaaacaggacatggctatttaccagttagaattactattgaaccaaaggaaaatgtaatcacaaattaatgaaccaaagttcgtcaactcaaggcaggcatgtttagaactatgaaaattacatcaccaggagaaataaaatgaacttaattgataaagactataaaagattttggtattcccccttttccaaaaaaataaaataaaaataatgtaattcagcaaagcatgtgctcattccatcaaaaggtcattttccctcctcccttaattatgctggacatactgtcagacagcaaataagtagttatatcagagaaatgataacttttcaagcatttgacttcttgattcagaaactactcacaagttttgatgcatttccacttaacatcactacaattatattacagtcaatttaagcatcaagcacaagccaaagcttcccatcatatatcctttggtctccttgtgaaatatggtggtgaacagtcccatcttaggaccaaagtaaagcaccaaaggcatgggtatgcccaggcatgattgcctaaacagattctgattttgaaaagttcatctattcctcttcaattacttttgtttggtactgttacgcaggacacataataattcaactaaaaggtactccaaattcatgtggcagtatcatggtcatggagagtaaaaggacaggtacacaaacagcttcagcagaactgattatggacacattcagccggagaagttattcatttaggaaataaaatgaaaactttgattttagtgtattccttttccaattaattgaataacagcttgctggggcaacaagctcaggaacaaaacttgtacagtgcagcaattccctattctaactccatgaaaattaaaagaacttgcaaatcaaaggtgtacttacatcatccagcagcatgttgtagcagtaagaaccaaagttaggtgaaatctgcaacaaagtaataagatattagttcatacagagaacaataattttgtgagaggaaacattatcatggaaagagatggatgagacacaacaaaattcaaggaagtcattattgaagaatacaaaaaaactttgacacaaactaaaatataaacataaatacatcaatcacatcacattgtaaaactcatcaaggcgacataacagaatcagctattaattaaatagagcagcatatccacaaagatgtttggcaatatcacaattccttcaataacaaatttttccagatctatgagttatgcgagattatgaatttgttatttgtaatctgtgtaagattagcaacagcaattattaaattagttcataagtcccagaaagaaatgaagaagcaagcatagcatacagattagctgaaggtcctctattgaaacaaattctggtacaaagggacgccacgattccaatcactgcgaaaattagcgtggttacagagaaccccataacggatcctaattcctgtgagacacaaacaaaatttgagaacgtgaaagtgaaaacgaaacgacacaacacaacacaacattacatatttttacattaccccttagttccggtaatgcgtcgtcgtattagtgatctgaagcttcttagcaatttggtttgatttgaattttatcacctcgcatggccactgattgattgaacatgattcattatacctgcacgcatatgggcccatcttattccctcctatcctgttatttgggtttcttgggccacgtttatcagcttttgctattaacactccaccatttactattaaatatattctccttttcttaacaaatattgcaaacgcgtggcaaatgaagtacatcgatcatacattcatactcactcttgtatgtacccaaaaaaagtataacactctcatactacaatgttgcctaaggtggtgctttccaagaaggaagaattgaaattgcacatgaaggtctaaaccaaaacattttccagttaaaaatttaaatttcttgatttaaacttctagatacaaataaatctttaacttactattccaaattttcaagaataaaatctaatgtttcaaaaaaatagtttttactcctacaaaaaattggaagaaagtttttctatctgcatgaatcaaaaaacatctaacttaagtttttaggttttaattttttttattcttaaaaaagattgacatgtattaagaatttacaattcatgaatccttagattctttgattttaaatctcaatttactcttatatattaaaatacagaatttttttataaaatgaaaactttaagtgcattgaatctcaaataagactctgcgtagtttgattttttttattaaaaaaactatatatcaaaaaataatactcagcccgatttattacactagttaagatgttacaatagcatttgacgaaaaaaatgatatgtatgataccaagaacgttaattgacgcattaagagaaaatagattaatagaaatttttaatataaacaattggattcaaattttatatactaataagttttcaataatttcttcaaatactttaaatttgactaaaattttaaaataaaatataaaaataccatcattttaaaacatttaaataaaagaaaatttatagaaaaaatatttcaagacacgtcataacatcaattaaattggtagtgtgtatgtctgtgtttcttttacagcaattaaattgatatagtatgttaataactgatttattagtgattatagattatagatttatttaaattttttttattaatgctttttttactagaattttattattattaatgattaatactctttactttctttcttctttattgtaacatgcgagccaacgagcaagagacaagagtggagcgaaaaacgacgtcgtcgctttccgtaacgatgaactgttaataaacaacgtcccttcatgtgattcgaatccaaccaagtaaacaaaatccactcaaaattggagggtaatcagcttcaatttctttccattttcattttgccctaaaaccctaatttaaaaaaaaaaaaaaaaaaagaccgtgagtgagagagaacaaaaaataaaaatggctatgcttcatcccctcacaaaccgcaacccaaacgagcttctctcactctcatgctcttctatattccaccacaatgcactcacaacttccgtttccttcaactccagaacaacaaaaattgctcctcaatgcctaagtcgtcgtttcgggtcggtgagatgctcctacgcttacgtggataacgccaaaattaaggttgtcggcatcggtggtggcggcaacaatgccgttaatcgcatgatcggaagtggtttgcaggtgggtcaattgggtattgtctttgccacccaatttggaacatcgataattggttattatcaatatcattttttttcaatgctttctatttgtagtgactccaatgctttacttcttgtgtttggaggttataccactttaaaatagttattgttgaagtaaaatagttattagaaattagaatgacagttctatttactcttcttcttttttatcttgattgcacattttagattcacttatttaatccaatgttaatttttagccagcggcgttattctctaagataccatttgtgtttggacaaaacttagatgtaattatttaggagattttgtccagttagaattagagtttcacctcgatagtttgcataataaatgcttatattcgatgtcggcataggttgccaaggtgaaactccaattctgattggagaacaacacaaaagcacctaaataaatgcatctagtttttcgcctttgtgttttgctgccaccaagtgaataatgcagatgttattgttgaattctgcggcattttcttttcaatcagggtgtagacttctatgcgataaatactgatgctcaggcactattaaattctgctgctgagaaccctattaaaattggagaagttctgactcgtggattaggtcaggcactctacttgcatagtttttactatgatgtgatttgtttttgtggctacagtcttgtttctttgctgaatttgttgacaaattgaggggggtggcctttgattcaaattacctgatagacaagcaggtacgggtgggaatccacttttgggggaacaagctgcggaggaatccagagatgctattgctgatgctcttaaaggatcagatttggtatttataacggctgggatgggtgggggaaccgggtctggtgctgccccagttgtagcccaaatatcaaaagaggcaggctacttgactgtaggtgttgttacctatcccttcagttttgaaggacgtaagagatcattgcaggcaggtgtcctttttctcgttatttgggaatgtgactactgaattagttttgctcttaatttaatactaccttctttttttaatatgttgaaaaatatcacttatcttcttcctttgcagtttattttattctggttaaaagtgtgtttggaaattcatcttttgacattgtgttgaaatgaatggattttccaaacacaccatatagtttgttatccaagttatgtgtcatccagtatatataatttgttgtctgaaatttattttatctagcagataagagtctatggttcatctgaaacttgtattttgtcgtttgaaatctagaaaataagtctctagtttgcatttggttttcttcaggcctttgaagccatcgaaaggctgcagaaaaatgttgacacacttatagtgattccaaatgaccgtctgcttgatatagctgatgagcagatgcctcttcaggatgctttccgtcttgctgatgatgttctacggcaaggagtacagggaatatcagacattataacagtgagttgattggcaaactatgtattcatatttttttattcagacactagaacatgatttaagttccttgctgatcccataagatcagctacttgcaaggagaaaagggaaacataaaaagcttgaactattctccccctacttgttccttagtgcttttgagtggtcactggctcacttctccttcataattgggcattgtggctttgcatttatgtctgggtatgtccatgcattttttttctggacattataaactggtgtgccttcttgcaggtacctggacttgtcaatgtggattttgctgatgtaaaagctgtgatgaaagactctgggactgcaatgcttggagtaggtgtttcatcaggtaaaaaccgagcagaagaagcagcagaacaggctactttggctcctttaattggatcatctattcagtcagctactggggtagtgtataatattactggaggaaaggacataaccctgcaggaagtgaacagggtttctcaggtatttaaagattgtcaccacttgcttaagaaacattttgttattcctttgatcttgtgaatttgttgcaaactaaccttataatgtttcttgattttgtgtttatgatttcaagtatagtgctgcagttttttgttatggttatatttttgcattcattttaccttaacatgttaaaaaagttatttattcctctggaattcatctagtcaagaatttcggatagctacccaacctttcactggaagagaaaaaaaaggaaaatatcaatatttccctcaggggtctgtttttcttttcagtttgtgctgtattccgccttttgctgtatggtggtatacgtaccgggttcactcctaccttttcttcgtatttgccttgtccttaacacgtgtaatttttataggtggtgactagtttggctgatccttctgctaatattatatttggggctgttgttgatgatcgctacactggggagattcacgtgactatcattgcaactggcttctcacagtcttttcagaagaagttgctaacagatccaagggctgcaaagctgcttgacaaagtggctgagggccaagaaagcagggccgtccctcctccccccaagtcctcaaacaaggttgaatctagaccatccccacggaagctctttttttagtttcatggttcttttacccttttcatttttccaattattatattgtagtcattctgtagtacaatgatcttgatgcttaatttagtgggatatcattctcttgatgttctttcttcttttcaaatttaaaagcgttagtttgagaatatgttgtgattttattttcacttttaagtacaaaataattaccttattttcattttattttgtttattcaagagtgataggaactgaactagatttaaaagaagaaagaatgaatctttatttgaatattggagaatatatcctgcaatacaatagtgaattcgaggttcaccactctcctaatactttctggattccctttcttcaatcactcacctcctatttatctatttgtgaccctcccacatttagtataactaactaactaaatgtattttactaattgaccctcctgttatacattttgccccacctcctactcctatcagatttgcataacaagttgtaataaaaaacttttttaccattttctagacattctttaaagagtttaatatctatgcaccgaatcaccgtttaaattactttaaaataattattttaaaagttaacaaatttatcatatatgatagattgtgattgaatgattgtgtaaaattttttaccccgtcactatataacccttttttcttatttaaaacatgaaacaaagaaattataatgacatttttgtaattacaaatgaaaggaaaataaaaacaaaatatatccttgaatcgtttttgctagattaagataacaatgaattataaattgaattgaatatgaatatcctcttgttccctcttaccttaggatttcccttcttcccatggaaaaaaacgagggaaggttataattaagtgatattacatcatgatcaagcattgaggaattcttatagttaatgtgtgaagatctgacaatagaatgcatttaaatgtcatctaaggataaagtgataaagttattatttttataagaaaaacgttatattgattctttgaattatcaatgattctttgaatgatcaatgcatttgagaaggataatctagaaaccattacaaataaagttttgaatagctggaaaaaaaatattaaaaacaaaacaaaaaattcaagttaaataataagattaaaggagtagagtaacctgtaggatttatttattgaatttttcgaaattacatcatcaaagaaaaaattgcttaaattgtgtaaaaagaaagggaaaaaatgaaatgttatgatgggatttaagaaatttaacttaagtacctcgttgtggttgcacattaaagtttttattttattttttataactgggttgcacattaaagttgcacgatattaatgcaaatcacgtacataatacttgagcacaatctcacggagaaatgtgtgaaaactcaaccacattgatactccagccagtagcattcactttcatatttgtacaagagaaaaacacacgatatataaaacacctaaatatggcaattacaatacaatacatcgcctttcacgacctcaacaaattccattccattggaaaagtaccaagagaaatcaggaaacctggttatgattctttagtgcacacggcagaaacaaagatgaaaagcagactcttgccaagtttgggtattttattcattacaaatatttgaccaacagccaaatgacaacaaccaaagccactataccaaccactgataaaagcatgcacatgcaggagcaaccacccttggctcgcttatttaaaaccgctaagttcttctgcacccgctgttttcacaacagaaacataaaagataagcagcaagtaaatgtcaataatattaacataatttaaccttgatatgacttaacaagagatttggccccaatgaagtttacgataagagtgttaccctaagccgagaatctgtgacatctacatgttggtctaagtcatcctggcagacaaagacaaaaagaaaagattcagttttagaagggaaacaacaaaccactagctgaggttggctacatagattacacaacatcattcagctcggatcaaaaccaaagattcaggaagaacaaaaattaatgcacaaagggaacatacaattagtctagtgtgtagattcagctcttcattcactgccaatgcaatatgttttgtgcttgccacagtctcttccaattgctcaaagccatcatcttgttctgcttgaatagcaatgcactatcagatccaaagaacagattaaaagcaatatattttcaaacaatccaatcaactgacctttcataatttgccgttgaagtccaacaagtccattgttgtccaggtcaaccgttctggtaattgcatctggttttctttctggcccaaacaaactatccctatttgcaaagtttgacatgttcaacgtggaagccatctgattaacttttgatctcaaatttgaaagcatgtccttgcgacgattcatctccttctcagatctgcgtcaagtcagcaaaatacacttcataaaacaatagtgcaaacttcatcatacaccttcacagctgaattgaaaacattgcctcttctattttaaaccacgtagcttaataaacagcatgacctttttcaatcagcataatcaacaattacacactcacatgggctgcttgctgggaagatttgacaaaagggactgcaagctatcaagcctggtccccaatattgtaatctttctccttatagcagatgaaagacgctgggtttctggtccagatgcaggaaatgaactctgctcagaaatcatgccactgatatcatcagcaagtttcagtgcttcattatattccttcacccatgagtctgaagaagatgccattgacctgaaagaaagaaaaaagtgagagaaaaaaaataaaaacaaacaaatatgatgtttacatcggagaaatgaagaaatagcacaacaattaacaggtggaaaaaacttggatgcggttgtttaggtactttcggtgttattttccaatcataatttaagttttaccatagaaatcataaagcacatgttaccaagctgaaactctaattttaatagaaaaacaccggaagcatctaaagaattgcccggtaataaataaactagaaaggcctagaaatcttcaaaacggtatgggacatgattatcacaagataaattctatttgcttagtacaacccaacccatacacaaatttaccagtacccttgttcaaattaaactacttatctcaacaaagcttttctccatttaaaccagaattgctgttaacagcgagtacgaaaaaggaattgctggtaattactaatttactacaacaattcaagtatgaaagaacagcatgaagaacccttaaaactcatgatcgcacagggtaataataaaccatggagtcatcacgagatgctgatatctttaacatgagctaatttcacaatcagacatacacaaaacgcacaattcaaagaaaagaagaagcagagtgcagttcagaaggagaattgtgttgataaccgaaagtgatcggaattagagtaaagaggggaaacgatcggataagaaattaccctcttttttgggaagctaccactgctgtgactgtgaggaagagaaaaggggtgatggatgcgacgtcgttttaggaaggtgccgatggcgatggatgggatgaggcgtacggcgccacccaccaatcgtcaccgtcgtttacctcacgggattgcggaagatgaaaggtttcgaataattcattcaccacgacgtcgttttaaggtgtcattttcgcgagcattttctctatcttaggaactaggaacacataaaaaaaaaattaaaaataaatgtaactttttctggagttcatgtttgagtgttttatttatttattttggaaatttaaatttaaaaaaaataattttttaagttttagaaaatgaatatttaattttaatttatcacgtttaaatatattttaaatttatgatcataattatgataactacttattcaacatcattatcattatcattatcattccttcacttatttattcatctaactcacttaatatctttttattaattaatatgcatagcagcagtattacgcagaagagaaatgtaaaaaagaaaaagaacagttgtagatttttaggttttacagggtagaatacttttgggacttgggaggcttttgtaagggtggggatctattgatcttgaacacattttatctgtgtcaagtatgtcttctaataaaatgtttagcatttaaaagaaaacaattgttggataatgtatgaatgtattaaaagatgttatgattttaatttgttggttgaattaataatataattgaacttgtcaaattcaaagatatcaccagaaggagtccatattgcaacaagttgatgcatgcacaacaattgagtccccttgacggacaggaagattagttggtttccattccactaagggtaggcaaagttgtccgaaattgtctctcgggcacataccatacccgaagcctccttgttcatcaaagatagatgaatttgaatataagttaaaagtgtttttgagaatttttctactaaaaatataatatctttttcaataaaaaaatctttcaaaaatacttctgatttgtatccaatcaggctcttagttcctcttttgccagagtatgctctcgattttcaactactttcttccgatcatcgcctgtccacaatctgcctcgatcgaggtttccatcacatcctatattcactgtttttcattccatccttgccagatgctccaaacaatcatcgcaaaatcttcaacctctgatgcttttctagcttcatcattattgagaacgcaccctcatattaacattagtactctgattccttatatccaccaaaattaatcataacattaggtccaaaattccacaaaaatacatgcatcaagaagttcaaattataaattcatcttaatacaaggcaatcaatctcagtttcaaacacatttacaagatttctcttcataaacacaactttaaattattccgcctatgtccaataagtaaaaaaacataataaaaagaaatattattcaatctcatgaataaaacttacaaaaaataaaaatggtcaattacaaatattcaatgatcacttgtctttaaaataaatgttttttaaaataggttactagcactcattaattattttttccctatgataatagtgtaaaatattattgattttgttgatgactatgttatattaataaatcttatttatcacctttattagaacctctttattcaatcacaattttatctacaagacttaaatacattgcttaagtggtacaagttaaattttactcataccaaccacattttagttaatcactatgttctttgataaacaagtgcatgacttagactttttctataaaaaaattcacaagatgataattttgtcagattttctctctctctctctctctctctcttaactgtaggctcaaagccaaatttttatcaatttcattattaaaatatcaagtaattaatattgtatttgatatgataaatatgtgaaatacagtaacatcacaaagtaaattttcttaggcatgtttggatgatttttagttattagtttcaatttttttaaaaagaaatgaccaatttttatttttaggttttttcctcaaaatttaaattttaaaataaattcattttgaaagttttatatcctattaatattaatttaagattgattttatgtgataacggtaacattaatgatgataataatagtagcggtggtcatgttgatgtcaatgacaatgatgaagacattgatccatagtaacaataatattagtaatgacgatgacacaacaacactgatggtgatgatggcggcacaatgaaaataaccattatcaaatgtagagaatgtgtgattttttaaaattaaaatccacaaattattttttgttttgttttgaaaataaagatgagtaaagatatcaatttcatttttaccaagcatttttgttttaaaaatcatatttaaaaaccaaaattaaaaaaacacaccacaccgaagagtcttaattatttctgtgattaaatttctgtgtgtaaaccttgacgtcgcatatatattatagactgttaaacgtttaatatttgtaaactttaattgacatgctatttctcaagttcttcaaaattacatgctggtgtctttgcatgccattttcttatttttcttttctttaaagttactactatcaaatacacacacgtgtgtattgagatacgatttcctcaccacttaaaattaccatcaaacacacacacacacagattacacttgttacatatttctaatttcttttgtattttttatatttcttttgtcttttttattgcatcacattaattactcacgtctcttctattttcttctctgaatgcccaagagatgacaccattttctccccatatgtatttgttacttgaactctacggtttgtaccttgtatgcatggaagctaagtagaagaaaggaagagtttctatttggaactatatacacacttggaaagtagttatatttttcttgtgggtgttttctgattttctcattgatgtgcatggtcaagtcattaattagttccgtatggttctttagctaagctgcaacttgagggtttaatctaataaagacttgagcaattttttattaatatataagtacgaatgatatagaacttaagattttagtgtatattttatgatctttttttattactgcaacttaaactattaatcattatttatgttcttcattcaattatcaaaagaaaaattcaatcattgtgtcattatatatgctcgtgtaaaagttgctataaaggttggatatacatttgatagtattgtcattttctttatactaatgcttatacagcgagaagggcatgtcgacagacaaaatacctgtatatagttctattattttagtgagcttattttatttcaatgtattggtaactttgtcttattattttagtgttactcatccataagaaattcaaattttattagactcgatttcaattaatttggtatctttttcaaatcatggatacaagctaagtacaggctatgtaataaggtttgtaattcacttcatctctcatcttattgatttggtttaaataattccaaacaattcggaagtgttttttttttttttttttttttttttttttttttttattgacgacttcgtagttgtgatgttaatatttttttaccacatcaattaataatattttccctgattaatagaaaaataatttgagtttaactgtcatgtattatcagtataatttttacactattatataattaataaaaaccaatatattttatttttacactattctataattaaaaaatcaatatatcttttaacgtaattattttaagatcaaacttagcatatataataatacgtaattgaatgacaatttttttacactttcagtgtattataataactgcattcttaatattattgaataatttgtataatcttaatattgtccactaacttttttagactaccaaagtaattcttttagtaatataataataatatgattttaagggataataataatatgattaaaaatctatttgtatgagaattttagtcaatttgttgtcaaattaaataattttattgtgatatatctacatttcttagttttttttattaaaacttcaaataattgtttgatatatcatgttttcaaagtgtgtttgtttgcgcttcctttacatgcctttttcttaatttcacatcaaaatacattaaaaaaaacatgaaaactactatctggggtgactctggtatggatcatatataattgtgataaaaattatggtgattgtgaaacaacattaaattacttcaatttttttacaggtctcatcacgataatggttgttcattgtggttttactatcaaaccaaacaccatttatattaaacatcagacttagacgtacttaagacctactaatgcctaaccaaacactcagctatcaacatttgattcttggttgcattttaaaaattattgacagctgctttttcaatttctagttgcatgtgtgtaaaaagaaatcaagtttttttttttattgtcaattattttgattagaaatacagtttcgaacaatgactttaataacctaaacatttattaattattacatcaaattttataaatattggtttaccttatttcaaatatttatgatttattttaaaaaagatattataaagttatatttttttttactgtaatagaaagaaaatattatcgaaatggtgcgatatgactagcgtcattaggaattcaatttcatgttacgaaagaatatttgttaagaaatatagtaaagacactagtcctaattcttggtcataaattgatattttttaagtagagagattaatcttgatttgtggccgagagatatgcaaataaaaacaaaaaaggtagagagggaactaaaaagagtataatatctgatgcagaactctattaaaaaaaaaaagatgaaaagtgagtaatttggaaatatattagaaaataaagagggtgattgcaaaaagggaaaagattgaagcagtagagaagagaagagagaggagaggggggagaaggggttgcagagagagagagagatgtcatcttcagacctggacaggcaaatagagcagttgaagaggtgtgagcctcttaaggagtctgaagtgaaggcgctttgccttaaagccatggaaatccttgtcgaagagagcaacgttcagagggtcgacgcccctgtcaccgttcgtcactcttttccctttttcctctttctgggtttcgatttacttatgatttcagctcacgtactaaacaaaattacctcgttggattttagttcaatacgattagttagttgataactactttacttgggacttcaatctatatagggcttgttataaatgtcatatatagtgatgagagaaagcttaagtgtcattctttcgaggggatttggtgttttttgtgtctctttattttgacctatttacataaaaaaaacgttgttttgtgctttgttctgtgtccagagtgtcatgggggcacacaaaaagttttttttttcttttattttttttctattactgtgcatttggggtctactctgctgtgttcattcttctttatgatcctgcttctggtttttgttgtgttcaactgattagttttgttggttgtcttggtctttgtgtagatatgtggtgatattcacggtcagttttatgacatgaaggagcttttcaaagtaggaggggattgccccaaaactaactacttgtttctgggggattttgttgatagagggttttactcggttgaaacgtttctgcttctgctcgctcttaaggtgataatttattcttcttctcttataaaactgcaagttagaagcatcttctgtggtttatgtgtttattttatgcttttttttctgtatgttagatctgttttgggtgccttttgacaatttaaaaaaacgtcccagtcagtttaatctatgattatcacagaaatgtggttggtcttcgatccatgggcttggtggtcactgcatttattgtctttgtgttaactttttaatttttttttcttttttgggaacacattttgctactgttggaatgaaattctacaagttttttctatgggatagtgtgagtaatgtaaggatgctttgttattggtgatgctttattaatctggtctggtactaaggttttgtcagtaaaaagtagaataaaattttgaaatttttgcttttggctgttgtttggtggatttgaatacactgaaatttactcagcagttttgtcctttcaatctcgtcagacatgattttatttgcttgctctagggactcgtttgtttataatatgaaggactactctttccttttgagcttatgttattttgtctatgctgttttctttaatctattttctgagaggatgcactgtcctcattctttctactttgtctcttgatgaattctttttcttatcatttttctaaaggaactaaagaagaaaaacaaaagataattttattttttttacttttgactactaggttctgtcagatgttgaactactcattctttttgtgctcttaatgatgcttctttcattttattcgttattgttgtaactaattaatgacatacaatcaggtgaggtatccggatcggataacactcattaggggaaaccatgaaagccgtcagatcacccaggttagtctatcagctaaattagaaaaaagaaataaatcctttttgtaaacatgatgaagaaaagtgggaaagacactaaaaattttcccaacattttatgactccagattacttattcaatatccatcacttgacaggtatatggattctatgatgaatgccttagaaaatacggttcagtcaatgtctggagatattgtactgaaatattcgactatttaaggtttgctaatatctgatagatcaccagatttgagtattgcattgggagctacttctccttaaggatgctttatgtcgcttgtctttgtttattttgaaagggaaaaaagtttgagagggtgcttttaaaatccattgattggttattttgacaaccttgtctaataaatgtatagactgaaaatgctagcaaatatttaatactcttttctcaaaactctttccattattaagtaaattccgtgtattatataatgggattcaattcaataataaagagagcagtattgtcaatcttacctgtaggatcgtatgatctacttgtgtggctattctgtgctcttgattagatgtagaattgtatgagaatgggattacagtgccaggtcacgagcttgtggaatgatctatcctcaacgagttgcagagtgtgccgtgaaattgtgggttaggttttatgaactggtggggaaaagattatatatttgccctaatctctcccctttttcttcaagtgacactccaatcaagcgatctccctctattcgaacttgtctctgccatctattctctatttcaagctcgttttggcttggcttacctgaaattgagaattttccgtgttttctctttttgtgttcgaccttggtaaccatacttatcttcagtctctgttcttgtttggaacccattttgacttgggttggagtgtttctctgttctgatctttgtagtggctagtgattcagtgttgagtggttctgttctccgcatcttgttagagcatttctgatttcaatctgatcgtcttccctgtccttaattttttggcttataaaagtagtgaattgggcttgagactggcttctaagtccagtacactttctggtcccccctcccccgatatcattatcaaatataaaacgagatgcattattactaataaagcaattactacaaaataaatatccgaattgttatctaagtcttgtggtattattacgcgtcttaattaattacattatcatacttttatatttttggtaggattttttaatcctatacaatcacatggtttatgatctttcatcacttctcgatcctagatagaatctctattttaacaacattcaggagtgttgaaaaaagtgttaaaatgcaagtgtttctcgtgcatagaaatagccaaaaattaagagacaagaggtataaatggaaacattctgtgtcaagttgcttgtaagacaacctaactgcatttacagatttaattggtatagcttgactcttccactaatagtgtcctatgtcgataacggcaaactgcagcttgtccgctctaattgaaaacaagattttcagtgttcatggtggtctttctcctgccatttctacactggatcaggtcaggaaatttaccctaatttgtttgtttttgtttagattgtacactagcaatatttttatattatttattgttaatatttagatacgaactattgatcggaagcaagaagtacctcatgatggtgccatgtgtgacctcctatggtcagatcctgaagatattgtggatggctggggtcttagtccccgcggtgctggttacttatttggtggcagtgttgttacttcctttaaccactccaataacattgactatatatgtcgtgcacatcagttggtaatggaaggatataaatggatgttcaataaccagatagttactgtctggtcagctccaaattattgctacaggtacctaatccactaatctattaaaatgatttttcttatttgtgttctatgtttttagtaagacattttcatctttgtcatagatgtggcaatgtagctgcaattctggagttggatggaaatcttaataagcagttccgggtgtttgaagctgctccacaggtttgtaggcaaagtcacctgatatttattgccattatgaattcgtacgcagagtgagctataccatttttctcaaatagtagcaatacgagcttcaatctctctattggtctacttgtcattgacatggtgacgtaacatagaatattctgtttcatatgactttcatgtcaaactcttgagatgctattttcttttgttttgttaagtaaggctttgcattttcatttttttctattcagcattttttttttttttttttttttgattatcttttgcgcatgaggattcgtagcttttttttttagctttttttttgattcgttttctgtaattcatcatatttatgtttttatatattatttctttttgatcaaaaaaaaaaatgtggttaagaatgtgcttttcatgtgaccttgggttcagtactataagaatgtgttttatcccattttgtttacttatcagtttgttttcatttggattgcactatctttgcatgtttaagcaaacaattggtgttccttgttcttcgcgaacatatgatcttggggaaatttaattgtgaaatttgtcaattgattttcagtttttttaattttaatggaatgtaggaatcaagaggaacacctgctaagaaaccagcaccagattactttttatgaagtggatttctttgtttctataatctacatgctcaaattattgtgggagacttgaatcaaggagatgatgatgtctgactcgggaggaatcagtgaaggacaaatcagttctggaggcaggagttctgcatcccatccgtctgcttcaaccatctttagtatcatagcagtattgtgaatttgtatgtgatttgcaatatgttgttattacctttgttcattcaaaagctgtgatggacagagggtttagagggaaaatgacgtttgcatatatgaaaacttgattaggaaggattggattggaatcagggaatattgggaaataactttccaaatatataatctgtggaaaaaacccactggttgagttttgattataaagtttgggccataaaattttgttatcttcaatttatctattacgtgtaaatgtattattgctcaaattttacacctggtggttggtactgaaatattgccatgcctgaatttgaatttgaatttgaaggttcacttgtcaaagaaagggtcctctctctattaaaatttatcggaattgtttctttccatattttataaattttcatgagctttagtgttactaatccacaaaaagaatatgggagcacatcatcaatatttttaattcaagttaattagggtggatgatagatttaaaattaattttgcctatcaaatcttaattaaatttttaatttttaaaattatttttcccttaagttaaacaacttgttttttatttaaattaatttagaaaaaatcttaaaaaatacacaagagaaacatatttttattgtgtgaaagggtagcagtaatttattgagcttttgctgaagtgtaaaatgcttgaagcctgagcagacaagaatgtgtgagaaaacctagaatgcaaagctcatgactatgaaagccaacttaactaaatgatgatttatcccagttcaatcatgcaagaaagtttaactttcattagattacgttgggattggaaatccgagttattgtattttttttagccaaaagtctgagttattaaagtgtgataaaagttgagtaatattttaaaaataaataaaaaattaaaatatgattttggtttatctattttatttaatatgcaattttgatcatatattttaaaatcgagatattaaaattttctattttagaaaatttataattttggtaaaattttcaattttatttatgttttgtttattttattacaattaattgaactataaacttaatatatttatttatggtattgtcaaaaataatttaattaatcaaaatataagaaataaaagaaattaatatagacaaaattgaggatttgttcaaaattataaaatttttaaaatagagaatcaaatgtttatatttaaatataaaaaactaaaaatgcgaatttaataaaagaagaaatccaaaattacatttaagctataaataattcgcgcccctctatatgaggtgcatgtgtattttcaattattggttgttatatcctcttattttatcttgttacggtaagctttaaatctcttttatattttcaagacattaaatgtatttagtttttattcaatacttaccgtataaagtagcatgatgatagagtagaaggatacaacattaatttaaggcaaaaatataaaacattttttatttacttagttgagttgtatgtacttgtacaagagtaaagttaaaccatgtaggttcaagaatgggaatattgtaaaataatgcattttcaaaagttaaaaactagaacatttaaatatatttttgttgttataagttagtggttttttatttttggttctttctatttttttttttaaattttagtttctgcaaattaatatttttttaattatgatctatgtaagatatgttatttatttatagttcatgtaagcatgaatttataggaattataaataaaaaattaaaatcttaaagtgattaaaattaaaaaatgtaaatttataaaaattaaaaatgaaaatagaaatttataaagactaaaaatataaaatgacaacttaaaacttaaattataaaaataaactcataagaaacaaaaataaaaaaaatactaacttacaaaatcaaaaacatatttaagtaaaaatgaaaacttacaggtcgcgtgggtctcgagctcacatgtcgttatattaatcaatgatcactactatgccatctccatgttaatttaataatgatttttttaacaaaaatccaaaaccaaccacttcttgctacgtctccattcacagttgctgttcctggtcgttgtttgcaaaaattcagcttcaatccaatacgatataattcattattccacatataaaatagtaagaaaacttgtataactgtttcccttggtatggtatttcatcatatgggtgtgtttaagttttcatctttcactggataaacatgaagaattaaccatgctctagtcaaaacttgttttgctcaagattcaataacttggtctgcttaaagatattggcttgatccctcacacctgcaaaattgaatggcaccctcaatttgttttcttcttctatcccttctgttcctttcatcctccacaagtggtgatgaagagggtttcatctctgtggtcatatctgataaaggccttgattttgccaaggatattctgatagatcaagctgttgcctctattgttcagtctcagctgccacaaattgagaagactgtgcaagtccctcttgttggaaaagccaaagtggttctttctgacatcactatcaatgatatccaagttaattcttcatctgttaatactggagagacaggcattgctcttgtcgtttcaggtgccacagctgacttgagtttgaagtggaggtactctgttagcagttggttagttccaattggaatttcggacagtggaactgctactgtaaaggtatgaacctagaatgttactttcattttatactgcatactataacttttatctttgagtaaatagtttacatactaatagtgtaaagtgttttataaaatttgttgacttttataataactactttaaaaattatattaaccatgatttctgattggttgattgtaaaaattaaactctttatctttttgtaagttacaccgatttgcttggtggcttataatttgctttgttgcattgtgttttaattaagaaagtttgaccttgaactaaataataaatgttttcctgaatttggttatttttataaaaaattagttagcctggttgtactactatggaagctataaggaggttatggttgaaattgcattttcggcgtcttgcaattggagtaagaccaacttgttaaggcataccaattcagtataattgaaactagggaatggagatattaaaaaagaaagaaaaagatgtggtcttgagatggacaataaaagacatgtatttcagtatctgatagccaaaaccctgagtaatgtacttttgtgcaaatattttttttttatacctgtttagtcaattatattcctcattctatagtgctgtgctatgttggaaggttaatgatttgcaagtgggacttactgtgaatttaaggaaccaagaaggaactcttaagttgattctcctggattctggatgtcatgttagagatttatctataaagttgcatggcggagcagcttggctttaccaagtgtaaggaaccttcttaagccatggtttttgataattaggaattcttacacatgctctatcttagacaattatgttcttttattgctgattaaggcttcacaattccatggggaggcctttggccaacagctatagtcccagatctatgtttcaattttactccaatacttcaatctttagtgtgggacctgaaactgggaggccagataagagtgtttccgttatcttctgcaacaaaaactattctggggaatataaagctatatttctatttttttgcaggctagtagatgcttttgcaggaaatatagcatctgcagttgaagaggcaatttctaagaaaataaatgaggggatatcaactcttgaccttttattgcaatctcttccaaaaacaatcccattggacgaaactgctgctctaaatgtttctttcgtggacaatccagtgctgagtgattctgctattgaattagaaattaatggtttattcacaggaagaaatgaagttttggtacctcaagcttaccgcagaggatcagacctttctgcttcctgtggtgacagttcaccaaagatgataacaatttcattacacgaaagtgttttcaaatccggttccttggtttatttcactgtaagtttctgaagtttttagccttttttttttcattgcttagtccaataaatggagttttctcttttcccccttccacttttcattttaagctatatctgtgatgtataatagcatcatattacttgttgcatttcttccaccgttatatttcaagtgaattgtaatgcattagcttgtttgtttaggctttggcattatctagaatctgcagaagaaacaatttctttgttgttccacagtttgcatgttttcttgcatcatttattcatacatattagtggactgagttctttaatcgtttaggttggtcatggaaccttttgttggaattgctctaaatttggaaaaaagtattacttactgacatcaaatagaccttgtattgcagatgccgattagactttatgtattaattgggctgatgctttatgagaaaaagattaaaatagtagtgctgatgttgattaggctttatgtatttattgggttgctccaattacattttgcacttcaagcttttacgttatcataaactgaaatataattttgatagtttgttgttcttgtgctcaggcagatagtatgcaatggattgttgatgaactccctgatcaggcccttttgaacactgctgaatggaagttccttataccacaattatacaaaaaatatccaaatgacgacatgaatcttaatatctctgtatcttctccaccagatatacaagtgacaaacaaagatatcggtgtcaacattttcatagacataacaattgatgttctggaagatggtgaagtcatacctgttgcatgcatctcggtggtatgctttaataaagtcaatattgaagtagatagtttaaaattttatgaagcttacactgtttaaatagccatccctcataatatactgtgtctgcattctgactaagctatatgaaattcaagctttctaccatttttgtcatcatgttatcgcgcgcgcgcgcacacacacataaccttgtattgatcttctgattaaattttcagatttgcctacttttttttgtccatgcctaagattatactatttcttaaaagttaattattttgtagagtttaaagaggtagccatgacacatgatcattatcttgtttaacaagtccattaatctttgttattggtacaggattttagtgcttcttgtgctgtggaaatcgtaggaaacaatcttgctggttggcttaaattgagaaagttttccacgtacttgaaatggagtaaaatagggaaactgcacatgaatttgattcaggtatattggaataaatgtattcagctttgtattttgatatgaaattgaacaacaaaagccttatcccattagtcagctatatgtattatatgacaccattcggcccagttaaagaccaaaatcttcagagatatcattcgtcatgagatccttttgaacaactttctccaatgtccttcttggtcttctcccctcttcttcataggaataaaaaccatgcaatctactctcctaaccagtgctacttctagtggccttatttgtatggccaaattaccttaactactaattggatgaaatttaacaatacgaacaaataattccttctatttttagggactattctagatcaacccatgagtgttttctgtttcaattagagagaccacagtggtatacaaacttgattcattgtcatgtgaaatgcgaaagtgacacagttgccaaccatttgttaaacatatatgatatattcaaggtgtccggtttatgttttggtctatttccaaaatattacaaatgacaacactgccatagtttgagggaagtggtagacatgcagtatctttttttcctggcaataatttaataagcggataacgtgtaccaaccatcaagaacttttcaacccatttacaacctttagcctttcatatttcactttactgattcattcataaatcaaaattctgcacatggtttagcacatatgtaactccatctcatgtgcacaaccactccatttatattttgacatatatgattgttaaaccttagtgattgtatatcgaggctattatgttgaatcttactctttaactgtgtaaacatttacagtcagtgacatcaaccgtcctcaagaccgttgtcataccatacctaaactcgcagttattgagaggaattccactgccaattcttaatggttttgccattaagagtgctcgtatattgtatgctcccccatggattactgtgtgtagtgatgtttctttctcaggagactactatctcaaacaactaccagcttatgtatcataaacatgctctcagatatctgtctgctttgtgtactaagtggtaataaggtaatgagcaacttatcaagatggctatgaagagtgaatgacatgaacattggtgtagctctggattttacctattgtaaatcatgctgtcctgaagattacatggaaaaactgccaatagtcaaacgtccttattggatttggaatgctctgcaggttctttatttttttaatcagggattggtatttttatatgtaaatttgtgaaaataatatattaacttttgtttggatacatcatacataattaatatttttattttcccaagtattaacaaaaactagttttttaaaataaaaacatttatttcttcactactatccaatgtgcgaaacaactataataacagtaagttggaacatagatacatttttcttttatagaccacgtgtatatttacagaaaacaatcttgttccagcttaataagaaatgcttcttagcatacactttatatttacgatttcatattttgtatggcatcgtagattagatgtcttagcatgtgtgatgtcattgtttgctctggattatctttgatatccaagtgtgtgttaacttagaactccgaaaccttacttttgagtcatgttaaatgcaatctcaaaccagtaagatttttaggtctcaaattctcaaaagaatatacgaataaattttaatttcatctttaaccaactttattagaagtgcattaagaatatctcttttgcctactaattagagatttatcttttttcagaaaatgctagattatatggagatatttgataataaaaaaaatgaatgaacattgagtgcatgaatcatactaacattaccttttaccttatctggaatatctataacttgatttcaatgaaagtaactttaacttgatctcgatcaaagtaacttcagtttaatattaatcaaaatattttcaactcaatgttaatttgagtaatttcattgtccttcgttagaatatttttaacttgtcatcggctagagtattttacatggatggacaaaacaaatcacaaataaatgaattcttttaccacctctaattttgacaaattgagttgtcaagtcaactcgaacgtgtgtccaccttcaactctcgtgataatgtacatgatttagcaagaaaaaggtttatatttggttacataaaaaaaagggggaggtgaatttttaaatttaaggcaaatagagtaggggtagcattaatccacaaggccatgtggaccttttgaccttataggcttttgaccttttaatccattttaatttgtatgaaaaaaaaaaagtttattcatttcaatttgtcttcttttacctctatttatcttaattaaattttaataattttcaaaatgaattactattggtgaaaaaaactttatatctcaattgaaattaattgttatataaatctgaaaacaatttatacatttaaaaatattttatatcttaacatttattctatacgaagtaaaatggtaattaacattatattaaatggtgatctggaaagtggaaactcagtgagtcgcgttacgagttgggtggggaggagttaaaatagaggttactattaattagccaaaagcccttttatttttgtattctgtgggcgtctctctctcctcgctagggatcgctctgatcagccatccaaactcaactcgttctctttctttcaacacaaactcactactcactacctaattacttacacgccttcttccatctcatttctcaaacacacacacttacccgccaaaattttaattaacccttccaattcaaacctctttcttttcctttccctctcttcctctctctctctctctctctctagggtttcccctcccatggaggaggccgtctccgatccccagccggagctggagcagcagcctccgcctcttcagaacggggactccgacgagcgctgcgccaagaaacctaaattcgaccatggcgcagaattgaagagagtggcggagattgtgctggttctctccaccatggccacggtgcgcgcggggaggaagccctccgacgccgaggtcgagctcatgagggaggctcgcgccaaactcgccagcctctgccagggtttggctccgaaggatattgtcgccagggaagctattggcaccgtcattgaggatctcggattgaactccaagctcaaggaccagagattagggtttcgaactcccaagatgtccattgccgagaggtattcccatgctaagtggaaggtaaccaaccctctctctctctgctcaattaacactcaccatgcttttgacttgctcattttgttattcagtgaacatatatgtagaattaaaagaaatatcatctcgttaagcgagctgctcaagttaaaatgtgtgtgttggttgttttgaattatttgttatgataggtgcttgaggaatactattatttctatcgtgattgttgtgaatgtgtccgagttaggaaaatgaggatagcagcgtgtttggatatgcatcccgcgcgtgtaatttagaagcaacgacgtgtggcttctacatttttcttcttctcaatattgacctgaaaacgagcgtaacgtgtgtagtcaatgcattaccaaacatgcactaagaatgtagtgttcctagcactacgaaattcacctgattcttatgcaattgttttgtatgtttttttatggaggaaaaaggaatccttggccagattattgtatactaatgagctttatttacttggcttggctaagctagtattggattatttttcggttaattttgtgttgccactcttattgatcataaactaccttctcgagtgggctttttgttgagtttgttggaatgttgaactctgttaattagagaagtattttatttcttcacgcacaagtaagagcattaatttatttataatatgcatgttatgctaagaatgatgctatgccatttcttttggttagttttttctcctttattttctctttatttactatcatttttggttaacagatggaagaagcaaagaaattttctgcaccttctacaccttctacaactcacacctctcagcccttgcaaacaaacattggtggaccagttgacaatcgtgtgccatcacatgttcgaatttttccttctgataaatcaagccacccatcaatcccttctatgggtgcggtagtgtctattcctggccatgtttctgcaggatcttctgcagcattgcagtatcaagtgatcggcaatgaagtaagaccaccagtggtttctggtgtgatgcctggcagtcacttgggcagaaattcatcttccttagcattgcctaaagttgaacacccgcagttcaaagttgatggaggatcaaatgggtctccttacatgctgcaagtccaaggtattgtcctctgaagctcctcactggatccaatttccaaggactggtggagttacatttatgattgatgaatgattgacagtgcaatatgtttacattgaatgatagaatgtgaattgaacacactgatatggattttattttactgtgaagcaataaaacacataacattaaatgaatgttcagaataaaatgctgtaattttatggatgaatacttacaggttttattcaatgttaaccatggagtgatgcgtgatgaattttgaaagttgactgaattggtgtatatctaggcgaattggtctattgtgaggttattgaatagatataatctcctagcagatgttgctcccttttccttgtctttaaagagtctggaattaaactacattcatttgtcatttttctccttcaatctctgttatttgtatgtaactgtcatggaaagctggcattaaggttttaactatctattggcattttcttctcttttttttttttccagctaaaggtggtagtctattctctattgtatctttataatgtgtatgagtgtatcttatgacattttagtcatgaaattggaactggcaactgaatgttagaactttttaactgtagcaaatttatcagcaaaccaacctttggtgaatgctccaacatggtctatacagactcaagctgcttcattagctagaagtgcatcagaaaacaaggtgcctgttcagaattctgtcaaggttgaaggaacacctgatgtaactgtatcaagggcagggccacaattaacaacagacccgagctttagaccatttatcactcaaacagccactggaactttacctagtgtgcaccagccattgcaggccacaaacatagttcagcctcctttgattcctagtcatactgacattgctaagattgttcagaaagtgttacaaccaaagcttcctgtccatcccacgtggactcctccatcaagggattatatgaataaggctttcacatgtcagatgtgtgagctcagtgtcaatgaggttgatactgtacttctctgtgatgcttgtgaaaagggatttcacttgaagtgcctgcagccatcagtcttgagaggaattcataatagagttgattggcactgtatgaggtgcttgagtttaagtgggggaaagcctttgcctccaaaatatggtcgtgtcatgagatcctcaaacacatctccaaaattgccttctaatacaggaggcattcaaccctgctctgagaagaaagtagagaatgtagatccaaaggccatcccacagacgttagcaacaaatgggagctctgttcaaactgtttgcggtggcaattacaatgttgagttgtcatctgaatcaaagataccagataccaaagatatgcaagggactgacatttcatccaccattgaagctattgataagaagcctgatccaaacaactctatgaaatctcttagtgcagcttctagtccttccccttgtttgataggtgaaaattatgttcaacaaataaattctaaggttttgactggtaaagagacttcggtatctgagtcttttcctaaattatctgagccagctaaatgtgaaaatttgcaatcatcacaagattttcaagttgaacatacaatgtcacaagacaatgctcaagtatcatcagataagcatgttgacagtaatattatgaataataaacagaaggaatttcgtggaggagaaagtttaacttatgatattaagcgtgatgaccaagatgctgcacttgcaaattttgttggaacttctggaactaatactgatggtagacagcactctgcattatcttcagatagttcacatgcggtagaatggattggtgatgtagtacaactagtagatgagaaaaagtattaccaatcttgttgtattgatggagtaacatatggactgcagggttatgctcttttccccaccagccatgggaaactaactccttctaaactccaggcaagcaaatcatcatgctttccaatatagtctagccgtcggttatgtcatacctgtagaaatttatctgaaaaattgtgaagtagatatgaataacaaaaaagttgtttttggtgtactttactgcttctgttttgttttgattgatttgaacccttgtgtggaatgttacttttataaatttatagaacttttaacatagggatttattccatttttattttcagtctatgtgggaagattgcaaaactgggttaaagtgggttaaggtgacaaactgctactttcctgatgatttgccagggaatattggtcatccgtgtatatctgaagtcaacgaggtattttttttttttattacatacagctttatatataaaattataaaaaatagatgtcttttttattagatggatataaatacattcatgcaagtgtggaagtttgtcattggtatgttaactatcagtttttatctaaagctagattggcttacatgcacttatactccataaactgtttattggtttgaacttgtaacctatacagttaatttctattttgtttgatattccaatcaaatgataatgcttcacatcttggacatgctcaccattcagaaccatatatatggatattttcttatacatatgttttctttgttgaaggtttatgaatctaatagtgatagaactgaaatggctaactctattcgagggccatgtgaagtcctctcatctgataaatttaaacaagaaaatgacaggcgatgtcagttaggaattgaggaaacttctaaagtgcagcccattttcctttgcaggtttgtttctttatattcatccatcattctagagagtttttattttgttttgtttttcttcgtgcctgtttcattcaatttatagttttatacaattttcgtatttgtaatgcagccatcaagtagaaaatatgattacaatttatcgcatggtattcttggtagaaaacagggagatgaaacaaatagctgagtatgaaaagggagataaaatgcttttaattatcgtttaggcttgtcattggtggtggaaaattggagattgaaacatattttcatgctgcttgccaatatgactgagcattaagaatatatcatgcttttctattttgatttcaatttgatgaaattttggttcaaaagggaaaaactccgtaatttttagataattaccttaccaggaaaataatgaatacaagaaagcttaattgtcaattgaacctggcagacaatcacaaacaaggactttcatgtatatgatgaaggaaactcccttcattctcacgcaaacccttgtaatcaatcttgcgaccaaccccagatacgctatagtgggtaggatagcacattctggaagccaaagactgaaatgaaagggcaaagaaagaatagcaggccgaactataattgcagtcaccgcagaagagttgtccctgctgagtgagggtggggggcaagagaaaagagaaaatgacgtctttatagaagaggagggtgttagtgtcattgctgttgaattttttttttttttttttgggggggggggggtgggtgttagtttatgtatgacaagggtaattgccatttgcacccttaaccctactcccctaaacaacactactgcaggggcaaaattgggttttgaaacacatcacaattgtgctttaattgcacgtgagaatcttgcaatttggttgtgacagatttgacccccaaaatgccacgcaaggatgtggctgtagtgcccagcggctgctctgcggtgctatggtgtcgtattaattaccttggaaacaggcggaatgtggggaagaaagaagagcagtctgcactgtatttgcagtcgctcggagaagaggtcatctctggtgtgggtgggtgggcaagagaagaggatgtcttttgacaagagaaagaaagaggatggtgttggtgcgttgctgctggggggtagttttttgtttttgttttatgcatgaccagagtaaatgtcattttcacccttaacccaccctcctcctaaacaacactactgcaggagcaaaattgggtttttgaagcccataacaatcgtgctctgattatgcgtgaaaaggttgtgatttggctgtgaccccaaaaatgccatacaacaatgtggccagcgttatcaattgcggattgtggaaaatggcggaaagctaataatctgctatatcatttagcggatagtgtcacaggcaaataacaaaagtcacagtggttgaattatgatatatgcataaaaataagttgcatgcaaataaaaaatatgcctaaaattgacatattataaattcaaaagttcaattggctggagactcaccgaagatgactagaggatacagggttcatgcctcaaccacaactcccatagctgccgcaatagtggatggagtcatgattgtggatccaaagaattccataacgcaaaagcactatagtgctgctgtagtggctatttaacaacactggatgtggctgtaatgcccagtggccattctgctgctattgcactattaattaccttggtaacggcctcttttgataacaacattggttaacctactcatctcggaaaacattacagggctaacaagaccaacataatccatgagtctaatctgagtactttacttcaactggccattaacaaaaagagatacatatgggctaacccaatagatacttcgccatatttggcattcagttagtccaagttttaccaaatacgtggctttgctagtctatttatttatgttctgatgaagttatttcataagcttggaatgcaaataaatgctattctatttcattgctgtttctttgtttcttgcatcattttgtgttttatatgcttaactactggttttgaaatcaaatattgaattcatcgtttaaaggttcataccttcactatccgactaccagtgtagctattataatctactggtatatccacactattattaatcaatctggacaaagtctgaataaatcagagttgatattttggccttttcaatttttcttctttttgtattgacttttgaggtgtctcaagtgatttgacttgttttgcaggtggttttatgatgaattcaagaagttatttcaacctgtaatcagttgattatgtcttgaacgtatatgttttgtgattcttacatggtgcaattttcgtggtgagtatttgacccattacctgtccaaattgtcggctgaaacttatttttacccaatgtatctactgaatatttctatccccttagagcacttgtgcgccttagtaaaatcgtgggaacattgggttgggggttatattcctgaatttgggttgaatttatttctgaagcttagacttgtaaacctgctagtttctactatttcaaaaataataataaaatttatagaatccaaacatgacaatgtgataatcacattcttcatctctatgataaagcaattaaattggaacaacaaacaagggaaaaataattggaaatttgggataacaaattaacaatcatgacaaacaaataggactttcaagtcatttcaagcaaaaattagcctactactgtcttaaaggttttgaacttaacattgaggatattttttaagagaagatacctgaattgaatagaagtgaattcaagcttggaaccgagcaagaacagatgaatatagaggaagcaacaaacatgagcccttttagcttcatggacattaagttgtgaatctacttttcatttatatatttccttcttttctcttatttgcatccacccctaattagtgataaagcctgaaacaatagttaactaggtaaattgaagaatgcataacattttggtgttatagataaacttggacgatgcagttttataatatctggttaccttttttgcctgaaatatgatgcatccacacttaaaccttaataattttgaagacatacatgaagggatgttaaaagcggtatttggtgggtcttgattctctccgtcccagttcctgtgctgatctttgatgtgcttctgtttggatgcaggtatttggtggggtttcgaacaggatatttattgtatgggtaattgagcatgcattaagattcatttgagacccattataaggcacattgcagcaacattgcctcctcgtacaagaatgttctatcatttcagcataaattgcttttgatgtaaaatatgtagctgaatctgtggactgcttagtttagctttcgctttggtagttctttttccgatagatattcattctgtataattcttttttgggcattaggctctttaggcccaataattacattattatctttgaattagatcagtgtagttcccttagtttgctgaattgtaagatacttcatttgtacaaaagccatttcttctaaaatgcataaccttggcaatttcgttatcaatttggcgacacgtgatgatttttctagctatcgccaaggtgtttctagattctgctggctgagctttagtattgggtcatgggttgtttacgggaggtgttttaataaaatatgttcaaatcgtccacttaataataaaatgatattgattgagtcacgtatattcacttctcttttcagacatgaaactactttcttaatgctgaattttgggtgaagaatttgaatcctgctaacttcgcgtccatcattagtcatgaaaaaactcttgcagtggtcgatctcgagattcatttcatttgcactttgtattgtgtgtaatgcaacagggagtttttgtacgacttgacggtacgactactaaatactaatagtattaaacattgttttatcagtcgcatcatcttcgtaaagtaatactcttaactttctcaataaaaaaattctaactcagctctagaattggtttttcgaatgaaagacatgtcttaaattgttcattttggataagattggacaaattacattaggtactatttttttcaaagaaacatactgactggctttgtttatcacatattgttatattagagatatttttatttcattatttgtcacactcttcaataattgtagatgtctatttttatacttaaataaattatactgggtgaatagtatgagttaaatattatactttaattttaacatgtatcagtattagttttattgtggttttatatatttcaaatatattattagtaaatattactcaattgttcattttcattaaataaaaataataacatttaagataaaattgaggcgttagttgaataaaaaaataaaattctaagtaaaatttttcatactctttaacaattatctaacctattttcgtaattgaataaatcacattggtgaatagttcagattagataatacggttgatatattgatcctgtaatgattggcatatttcaaacgtattttaaataaaaattgtccaataattcatcgataaacgtgcaaaataaagacactcaaactttttgtattcctcttgcatcatgcaggtaaaaaaactagttgtgtaaggcgacagggtgtttttgtacaacttgacagtacgactactaaatactaatagtattaaacattgttttatcagtcacttcatctttttacagtaatacttttaaactttcttgaataaaataaaaaatctagctcagctccagaattagtttttcgaatgaaaaacattggtgaaaattatgatgaaaaggtggggggatgcgaatatcaaacagggggtgttgggccatgttctttctgctgaggtttgattcacaaggcccaacaaagatctcttcatgggattcatttgctattacaaatagtacagtataaaatgtgtgtgtgggggggggggggggacgggtattacattttcataaaatattgtttatctcccgcttgatgttcacgaattttaatagggttccgcctatttaatctttatcaagagaaaaatatgacaaatttccatataaaatttttaactaatctttttttttatctaccactctaaaaaagcgttgttagtagtacagtattttcttttatcgatccctataagtagcatccctatctccatttattgatgcgtatttggtggcctaagtttgtgagtatagacaaatagttaacgccttaacggaaatagagacaaaggaattgaagtagcttcgtgatatcaagacgttgactaaagtcttacattggaaaagataaaccatttgcatgagcatcgtgtttgtgaccatttttttttgggtttaaaattaactacatagacataggagtatgattaatctagattgagtcaagtgggactatcatcgcagacgaaaaaaaaattcccctcgaatttaactcgagacgtactccttgattaagttagaaccgagatatatgtatgattagcagcaaagttgcaagtcctgagtttcatgtacatctccttctttcccaatatcattgaattcgagataccatgccgggtcctatatcatggaagaacttcaaattatacactgagttctgaatagcctatcaattttatataactgatatataggcatgtggatgcttacctcaattctggcaattcttcaaagtttagactcgatcgcttaattggagatgaaattctacgctgttagccaatcagcatggcttgatatagaaaaatcaatgcaataaatgtggatatgtagagatatactcctatgtacctaataaatgcccttttgtgaaaggaaaaaaaaaatcatattttacgctcttctttgtcgagacaaaccgctcttaaggtgtattttttgcctgaaaagtttgataccaataactgctatccttgaataattctgggggttgctcctttctagagtgacagatcaatatattttagattagtgttcctttagaatttgcgtgggcataaagctagatgcctataggctagatagagaatatataggaaagacaagttttatttataaattaaaattatatcctagttaaaatttaaaaatatttattatgaatgttataagagaatataaaaaaagttatgtataacacaattttatgtattttaataatttttttttaattttttaatcagtggacattgattaatatttgtcaaatgaaaatgagatataatatatatatatatatatataacaatttttacaccaatttatacataattttatgtttttatctttctctaacatatattatatttcaaaattttctttttcttctcacttttctttttgtaagatttttttttacaaatgtataatttctcaatcaaaattccacaattttttaatatttttttacagataaaattgatgtgaaaaaagagagtcgtgggatgtaataaaaaagagaatactccacgtatacaaattataaccgctgcaagagattatcataactatgtgacatttaaaagaataaattattaaattaatatgccacgtatacatattttaaaggaccaatttaatgtatttatatgataaattctcagagctactagtacgcaagatcaaaagcacacaagctattctattggatttgaaaaattatttatagtaacctaagtcttaagacatataaagagaaagagagggaagtacaagtatgaatataataggttatatgatctgatataaaaggagagatgaagagaaaaaaaaggtattaataaagtgtttgatatatatatatatatatatattaattatattattactcattggatttggacctcaaaagttctccgagcatgtgcttttctacgtaacatgttttctccttttatctttcgtagtggtagtagacaaaaatgatgaaattcatagtggacaaaggaagctagaagaatttgttcataattttagatcaagttgtggttctagctagttaataggtaattaattaaccgtagtggttttgaactaaaataatatgcgcgtagctaaatttacacaaagacattaacgtaccacagaaactaatcttcacttgcaaaaccaaaatatattcctttaaaattatacaaccacactgttgggagaaaagatcttaagctagtaacaaagcacaaattaacatcaaaacacgagtaagcattctcattaaaacttttattctactttattataaggcctcatgcatccacctgtctcaaaagtccaaatctgatgttttgaaccagaagggccacacacaagaaaaactaggcaacgaaccgttgcacaagcatatatgcaaaagggaaataactactaacttacttttgaccatcccaccgtatctttgacatctctcttagggctaaaagtctcccattctctttggttgaatgacctagcttattaagttactaaaggtagcctacacaaacgtaattattttggtttcaccaaaaatatgagtagtgataattcctaatccactaatctaaatagatgttgaataaaaagaataatgaatgcgaaaaggataaattataaatatagttcttgtatttgacattatttgttttaatctctatatgaaaaaaaatctatattttgatattcatatgaaaaattatttatatacaaagtaatatctaatgtttattaaagttataactttgttagaaattcctacattttttatcttgaattgagacatgtcatacatgcaagcacacatatgtcaagtttttttttcatgtagaaactaaaacaaaataaatgatgtagagtagggactaaaatataaattttttcatataggatttttttttaatgtagagaataaaataaaaaatagtatcaaatatagggatcaaatctataccattataactttggcaaataatatataggtatcaattcatatgaattaatgtttttctatataaatatgaaaatgtataatttcttctataggaattaaattaaagtattacatgtaaaaaaactaaaacttcaatttatccaaatgaatatgaaccaattgattttaattaagttttagggtgtgtttgaattggcgtgagttatgtccaacactactgatcctttgtgagagagtatatatcagtgctccctgttgaacatgtatcaaaatgcgggattaaggtaaaacaaacccacaattaagagatataagtagatgctagattattataatgttcatacaatgacaattaaaatatgcaggagataatcaaatatgctaaatataatataaaatgtataaagtggtcggcattgtttcacgtaaatggcgactatcacggtggtttggatttggactttgaagaaggagctcaaaaagaaggagggggccattagctagccagatgacaaagattccaagtttttggattccagtgtaaattaaatttcagaggatagaattaagtgtcatatatatatgatgcctttttcacaaccttttgggttatgcaaggctctatttctatgtcttgtgtgtgctttttagtaggaattgaaaatatatatcagagaatttataattgagttatattctcgagatatatatatatagacgcacaaagaaaaatagattgagagaatcaaaatcacatcatttatttgcgccgttcagatttgaactgtggaagttaatcctctcttttcttgttcttaaatataatatagttttgtgtcaaaccctacgaaactgttaaaataagtatacattgtgggccaatatataactgatacagttagttaattacaatttttaggtatcatttaaaattcagattgcgtaattttacatgcacttctaggatcattcaacctagatatgaaattaagcctcagagcatactcctatatatatagtccaaaaattaatgaaattataaaaacaaagttcttacgtttccttgcattagatggaattgtacacggaggaaaaactttcaaaaaccagttgatggcaatgcctgtattttttcttttaatttttgtgacgaattataatatagtggtagtgaaaaatacagataaatttctcaaacctagctatatgacatctctgaagccccacccccactctcgatcggtctctttatatatttcgtaatctacgattttgactcctataatgaagaatccgaggatagatatgcatggccttttcaacagtttttttttttttttacttatttatttaattttcttatatatgtggtgaaattacgtttcttaattacaactttaattttaacttaatataaaaaaaagtgtaacttttaagaagattattataatttttattttactcacgacttaataagcttttttattttattttataaaaatggttttgataaagtcataattaaacactaaacacaacttatatgaaaacattgatgtgatctactcacaactttttaatgcaattttttttatgataaatggagaagccatggatcaaagacaaacgttacccctagctaattaattcatgatttgaccatgatttcattatcacaacttaattcgtggttaggcaccatgattttcatttaaattaatttgttgcctatcgcatgagtttcccttgaccgcttggtataaaaatgaaatcatgcatggtaatggagttgtggctaaaaacaccgttaacccttaaatttatataaagaaagtaatggttcgatgaatttattttaaaagaatcgtttactaaattgtaggtatataagtaatatattgcatattggtaaaataaatttaaattccaccaaattctctaaaaaagataaaaaaaaattatggcataggtgtgacaactaaacataattaaggggttccttttgaacgacattcaggattctgtatacctgttgagacatatatgtgtgctgtccaagctgagaaagaatattactgcatcatccttcttgttgacatatctatctcttcatattagctagctaggttctgttattgatcagttttatattaactttgacaattttttattttattttgtttcactaaatgtcttatagttttattcgattattttcatattttttgaagtttgagatggtatgtgtacatgcatgtacttatatagtaaatatttttttagctatatcaatatatcaacatcacttttaacttaagttaattgatattgatgatagataataaatttatttgtataatataaagttgataataaccttttaaatatttaaatgtaagactatgtatttggatattttttctaatcacatttttctcattcacaaaattcaaatttaaaattttactttagagaattcagttcaatgttacttaaactaatgacatattggtatgagactataatttaatttattgctttatatatgtatgagccaagtatttttttaactaatatttgaagtctaattttttcaaagataaaagttaaaatgaataatttgtgcaactgtcattcaattactaattattatatgtgataagtttattttttttaaaatcttaatagtcatactaataataatttatgtttggttgatctacaatgtagtgtaaaattcttgctgatattatataaaaattaaattctaaagattagcaaactaattttatctctctcaataaaatattttatacttactaaaaccaaagtgcaagtatttttttttaaattcacaaaaatattaaaagtggaagactggtcaataatatatatgtttaaggtattaaattatgtctgtgaatattatgttagacttattaacaatatgattaatcgatgtttctttatcgtgctattttttaggaaaaactaaataaagcagtaactaattaataaacaaaagaaagcgataaaaactcaattgattaatctttctaaaaccaggtcatgaagctgaagaatttgtcatttattttaacatatatggaaatccatttgcaatttgaacactttttaccctttcttttgaccgataaaactctagaacgattacttctctcaactgtttttgaacgtcttcattatacgagagaacacggtttcatattaagatgtaaatgaacttaattgaccatatgtaaaaaaagaattaacaatatatgacatgcaatgcatgctattgctgaattaatttgtagttgtgaagcaactgaatttttggggcatctgccttggagtaaatgtttatggtagcttgaagttgattataacttaattgattaccttttacatcccagaaaagaaataccattccatttaatgaattcgttttggtaggtactaactgatgaaccttgatttctggggtgatgacttaattaataatgaaataattaatcatcatttggcttttaatggattactttgactctccttatattataataaagccctaaacagccgacaaaagtaatcaatctcctcacaagaataaaatttataaaaaattgtaaaagttgcttagtaaagagtaatcaatttaagttgctatttacatggcaaactttgggcaaatgaaaggaaacttacgtagccttaggaaccattattatcaccttctttgtttttcaccatataggtagctagttaattgattccttaaaatacgtatcattactcaataatctaacattatattttaatctaaactgcttaattagctgtatcattatgcatcgagaaatgtttttttatatatatatagagtgaaaaaggccatgatggaaaactttgcatagcacttactgtcttatgatttagtacttttttttgcagataatataaccgatatggcattctgatatcaaatatatagggattaattaatgcaataagatatctgtatcatttatacacactataataaactttaattcagaatatagatcgtctgctcacagtaaacttcatagctcataaactttagtgtttgtgtgtgattaagatccttctacctatttaataaaataatccttctaccattaaaaatagctatagatgatcgaaacattaatcttttgtcgaatcttagacatattctctataacagaattggtataattagttgttacaacaagcgaatacaatattatttctctaacaaaatatatactgtttttttggttttagtcagaaacaaaatcgatatttctatgtagcttatatgaatacaaagatccggcgccagtttgggccttccatgttgcacacgaggcccacactttagcttttaacttttttttcaagtttctttttagtatcattatttttcttttcccattgtgtagtatagttatctattttttttttttatataatgataacaacaacaaaaataataatgcccggttgcttaacataatacatagaagaaaaaaaagaaaaaagtagctagctagcccccccttctctgtctatatatatcacctctagcctcttgagttttccaaactctcaaacctccaaatactctttctcttgtctttatttttcatatacaacaatttccctttcattcattcattcatccatctcacagctattggggatcatatatatatatatatatatatatggctccaatgggagacaatgttgttgtatccaatatggaactggagaagttgcttagcatgaaaggaggtaaaggagaagccagctatgccaacaattcccaagcacaggtaccatatatatatatatatatatatatatatatatatatatatatatatatatcatatgtttgttggttacaaaaactaattttttttatttatctgacaaacgctacgtcttaatttactaagaaaaactaaattcagtagataaaacatgcatatgtgatatttttccttaatgatcgaatccaccttatatattgcaggccatacatgcgaggtccatgcttcatcttctgagagagacactagacagagttgaggttgttgagggacgtgaggtggcatttgtggtggcggacttggggtgttcgtgtgggagcaacaccataaacgtggtggatgtgataataaagcacatgatgaaaaggtacgaggcattggggtggcagccaccagagttctcggctttcttctcagaccttcccagcaatgacttcaacacgctcttccacctccttcctccgctcgccaactacgccgttagcatggaggaatgcctcgctgccaacaaccaccgctcctacttcgccgccggagttcctggttccttctaccggaggctttttccggcaaggtccgttgatgtttttcactcagccttctctttgcactggctatctcaggtaaccaacacttaatttattagtacatactattttaggatttttttttttcaagaaataagttataatgtatttttcataaaataaaagtaaaaataatatctctcttcttattagaatatattacactgatcatgatatcccctcttatttcttccaaattcacaagatacttcttttgtctttaatttttccagggttacgtacctttattatttatttaaaatatattacactatcatttttgttatactaaagaaaacacattataccattgatatatatatcctgtaacttgtaagggggttatgtaaaatttaaaagacagggtagtatttcaaagaatggtgtaatttactcttatctctttttatacttttttttaattgttaatatcaactctgacttttggtttgtgattttgttttttcatgttttcaataaacagttgtcaaattgtcacttcatttaaattttctttcttatttttaaatattttattttgtatagagaataacaaacataataaaattgtcttgtataaatacttaaaattaaaaataaagtgatattttatgtgattgtttctaaaaataaaaattctcaagttaaagaattaattattttacgcagttttttttttcttttttgtgtgtgatggggagggggagtaagttcaatagataacttcatttttacttctacaattttcattaattcgtttatttctctttgcaattgaagtggccggttaaattattacgaaaagtcataatttatttcaaatcatttatgtgtatctttcatcatttgtttgcccaagatctttataaacctttcgattagaagtccaactttaaggtaccacacatttcttggagacttttggtggatcacgattacactaatttcataaatcctttaaagcaattcttgttaacaagatattgccatagtcgtttaatttactccccaacctacccatcaataatcaaagattctctattcctgcagtttttgtcgtctaatctgttatttccacgacaaaatgaaaggaatatttgcctcttcccgaggataagatagtaaagccatcattaatttgaagcttaagtcataatttatggtcaaaaagtgaatgcagaaaacccaaggtctatagggttgaaaaaaggaccatgtttcagggaaacaagtaacgtgtttggacagtaattttcaatgcatgcattaagcacccaatgttcttctactttcatgcatcttaaatttcaataatatatggggccagcacaaagaatttgatcaccaaaagagacacaattggagttgggattccccctgtaaaagtgtgtactatttggtgcttattggtcacacacatttacataacatgttctttatcatacaaaattctgatttcttgcagtaaaagtgtgcagtgttttctaccctaaaggagaattgcattaaccaacatggtgtgacatagttaaaagataattttatctcttatacatatatatagttaggacttgatcacatgccaatgcatataaaaaaatatcttagaaagagattgactccttaaacatatatgaatagtttgggaaattagttatggacttcccgaccaagagatagtctgataccccaacttcataaaataaaataaaaaaaaaaaaaaaaagcagaaatgcatggatttgaatttgctaaggtgaatgttagttaattggatgtgaccaattaatagtagcttattgttacattaataatgataactttatcattcataaagatcttactcgatttgagcataattagcatagtctttaaaaaaaaatatagtgcatatttttctcttcgttttgtttcaataatttactttggtgcaggtgccagaaagtgtagtggacaagaggtcaagtgcatataacaaaggaagggtgtttatccatggggctggtgagagcacagcaaatgcctacaagaaacaattccaaacagacttggcaggctttctgagggcaaggtcagtggagatgaagagagaggggtccatgttcttagtttgcttggccagaacttcagtggaccccacagaccaaggtggggctggccttctttttgggacccattttcaggatgcttgggatgatcttgtccaagaggtaattatcataatcacaaacatttttatgcatgcttgcttgtgtcaacagtggcacatagcctctatttcccattggctgaccaaaaagaagtttgagacactgtagagattaaaagacaaatatgctcaagtgttgtaggcatcaccccaacttatcatgagttttctctggccacgtttaaaataaattggtcccagccgttgattagccacccctatattgatctagccgtccatttcttgatcatcatgtcggcataaatgataattaatttccggctggctgtgtcttgtggtccataatgttgaccaacaattaggctttggatatcttaagagcttagaacaaacactgaatcacatcgatcatcatgtcttaaagctatagacaaaatggatatgcattcatctgatcaattttcatacaaagatcattgccaatgggacacaacaatgtctttgaacacagtcaaaggcatgtacttataagaaacatcctctaccatgttacacatccaaattccaaaactgtaatcaatgaagtacagaatataacgacaccaacatagtaggatgtgttgagtactttagaacattttcagttactcaaacatatgtcatggtaaatctcacttaccaacttaacactatagatataaggataatttcacattatagttgagtatatatacattattaatagaatggtagatctaaattgtcatatattactgatgttagaatttatttttttgttaccttttcaaaagcagaagtcttgatttaatttcaagaccaattcactatctatccttttatgaattgatatgaacatgttattttatagtaaatcatattcttgatttcagggattgattagccaagaaaaacgagacaattttaacattccagtctatgcagcaagcctgcaagacttcaaggaggtggttgaggctaatggttcatttgccatagacaagcttgaggtattcaaaggaggaagtccacttgtggtgaaccaaccagatgatgcaagtgaagtaggaagggctctagccaacagctgcaggactgtgtctggagtccttgttgatgcccacattggtgacaaactaagtgaggaactttttctaagagtggaacgtcgagccactagtcatgccaaagaactattagagcaactacaattctttcacatagttgcatccctttcttttgctcaaatgattagagactgagagaaaaagggtcacttgaagataactagacgacaaagactttttctccacaccctcccccccccccccccctctctcccctactctttgtgtgttgtgttattgcataggaggagtcagaaagagaaaagagaggttgaaaacacttccaacctactgttttttctccctcttttgcgtgttgtttgtgtgtcatattgctgactctagttacttgctgcgcattatgcgctttctgacttgtgttcccttggatcgatctgaactaattttgctctctacatagcatacatattatagtgtccatatcttgtgagagtcgtatgaatggaacttgtaccttacaagctgggttgttagatagaccacttgatttagtcacagtttgctttcttccttgtcctcatcaatctaacacttttttttaatatttcattagcaaatctaattggtagataaatgattaattctgttctgttataatttaaaggttgaaagatggctttttctggcttgtcctataacatttttaatagtagttggatgctaccattatattgtgccatgccaaccatgcattgttaaatctgctgaccaagaaccaaacctgatatacatatttagttagtaggaacaaagggaaaacttccccaaagaaatgagtaatgcagagaagaaggaaaaggaatcctattaaaacaaacagaaaacagctgggaagggggaaaaaaaaacagaataggatattatcagcggatgaaaagtgttctaagcaactgatattgaaaccagtggcggatctaccttcaaggttggggggcagtgccccccccttaaattttcaggataaaaattaccaatatgccttatatacatgctaatggaagtgctcaaaaactgagacaaagaagacaagaaccagggagagtgcagagtgccatagttgatgatggaaacaaggaaatcatcctcgtaactgtagtgattattttctcttaatatgcccatttattgggttcggtttgaaaatgggccacaatgcagctgacataaaagttaaatggtatgataaaagttgagttcagtttgaattaataataagtttctaaaattataagtagtttattaataatttaagtacaaaattaaaagaaaaggagcttttgaaaaagctacaaggaggaacttattttcagcttaggtgaagcttttttacaaaataattctttgattctagcaaataacattcatctttctatttatttttcttttattgaaacctatggccatttatctttccatttcatcacaaaatctgcttagcttatttttcttttgctagccttttacatttgttatatttccttctgttttaatataagacactttcaacgtaatcacaaaaactaataaaagtaggtaattcaaatgtttttaatgattttattctgaaacgaggaaatcatcctcgtaaatggcattgtcactccatcatgactagagagtattttggaccagattgaggatttgcagatggtgtaattgttaaagaggtcagtgaaaaaacttttcgtatatgcaaggagttgatagatggtgttattcttgtaagtcgtgattcaatttatacgtcaataaaagtaagattttattttgcttgtaaagtttgtattctaaatctctgatgctatatatatttttcatgtttatatttataactttatatatatacttctctactctctagtatcttctgtgaatgttagaaaatttattgtttgttcctttggattatggtttataattatttgttcttttaattattgtttacaataaaaaaaaaattcaggagcgttatccccgaacccctgccactaagtatgtggatgtcactggtgcccccttgattatttttctggatccgccactgattgaaaccaccttaaaatgaaaccaacatggaagcaagaaattctcaaacaccaatatacatattatctgacagtttagaaccttacaaatagtcacgatcacattgtaggtggatcactaactcggattcttagctatgtctgagattttgatccattattcttgcactccaaatctctagcacatactttccaaaaacgataggagagacacatcattctagtaaactcacaattcacattaaacagattgaggatagaaactaattaatgcactaacactcattaaaatccatctttaatggatacaaaaatgatagtctccgacacttctggcagtctaaagctcacccttttcttcaccttactactttggcttctagtcaatggattaaaccccatttcttttacatcaaacttttcatctttcaaatttgaataatcatcaccatttgaaagttgctccaaagacaaactatattcctcccagtcagaaaaataggcactttctctagctattgagggataatcacagttagggccatgctttaaatcacaatgatcaccgttgcagttaccatgcttttccataattggtgattttagaagccactcctctaatgtgagctccttccccattttctgatgctgctcctctttattcttcttcttttgcatcaccttcttaataagaaagtaagtttgcttgatatttttgacaatccatactactgaactggcctttacaaaacatgagtcttccttaggtaatctttggcgcctaaaataagcctcagaacaacagaatgaaaagttaattcccattccgtttgtttaattgcaaatgggaagggtcataaggatagtggtatagactgctaagtctattatataggacacctaagacgtattatccaagagttaagaatattacactccatgcctttgttaatatcaagaagaaattaaggaacataattgatgaatggataaccttaatttattttttacagattaaataagcatgaataaaaccttttgcagtttatttcttcttcttatcacttttgataaataaaatatcacgaccacaactagtaattctgaatatctcagccacttatttataattatatgcatatatattagagagtactagtggccgttcaatgtttatatttgaagtaaagtgttaggtgcaattttacattagttagaaattgaaagattgaatatcacataagtaataggaaaattcataaatttgagggttttgagttgaaatatgatgtaagttcatttatgtggtgtgctcaaggtctattggtgtaaattttctgatgtttatcttatcgattgcacaacaattgctatgatgaaaatgaagacaaaattcttagcttatttgtcaggataagtcttaggcagtgacatttagtttggcggtgaagacaaggcttcccaatcaaacacataaagacattgttgacttgaagaaacacagttaacgttgcggctgagaactatttgccttggttgcatctaccaaactaccaaattgctcctgtaaaaggtaaccctaaaatcaagctagcagtaccattggagcaggaatttataaacaatattcatgaatgaatatccaagttgaagacagcatcctaaactaaactatgttggagtgaagacaaaattgcaagactgacaaacagtgaagcaaaagcctgagactccaattatatgatcgctttgtgttcaactgttcctctatcatcacaaccgcagataaagttgttcctatgccatatcccatgaatcgatcaagaaaggataaatttaaataaataatacaaattaaataaataatttgaaaaatgggacagttttgaaaatattttgaaatctgggcctgtgtaacacacccaaaatagacatgtttaaacacgtccaatttagacgtgtttcagctagttgtgacacgtgtcatacatgcacagtgtcgagcgaacttcgaacgatcataacttttgataggaatgtccgattgagacgtacgatatgtcaaaacgctcgaaattcagagaggaaggcttggacaactccccaaagggaaattggtcaactgttttttttaaaaaaggtctctaagtatctcaaaattacgatttatgattcaatcagtcaaaaattttcaaacaggttacttttttaattatttaattagttaatttaatgttattttctatttttttaattacttctcttaatttcgagcattttgacatatcgtacacctccatcggatatttctataaaaaattatgactgtttaaagtttatacgctcaaaattcacttgaactcaaaatttatgcatgtgttacaaaccaatttgaaatctattaccaattttgtttgcaaatcaaatcaacaatagtaccatgttaatgtatgaaagttttgtcccatattaagatgacgccatcttttttctttggtctcttatttatttcttttatcaataaatagaaattttattaaggagcatagggggtactttaatccaatatatatatatatatatataaattatttgttagatttgttgttttcagttttggatctctttttaaaaatatttttagaaaaaatgttttctaaattttaagtaaataatttttactcttattttttattttctttgaaatgaaaataaaaaatacttaaatgaagctccaccttaatttgtagttgttatcggtattggtttgagattagagtagtgtgtatttgtttagtcaaagcaaaaataagagagacaaagaaaattaaatactaaaaagaaaacaaaagttaaaaattaaagggaagagattttgatcgtatttttcccttttacattctccatttttctcctatctatttaagaactagatttatatattaaggtttaggttagacagaggagataataggttccgcaagtaggactaccatagttttaggtttcttctacatattaccagaaaatgagaaatgaaagtttttttatacacattctttttttgccaaataacccaaataaggtaatgtgattttggtatatctatttaccaaaattatactgtaaattttaacgatttcagtttaaaaaaattaaaaaattacaatattgcggccgcaacactaatttcgaaaattgaaaaaattataatgtaaatttaaaaattgattttaaagtcgtatgctaatttcagtctctattttagtctataatacattttgtgacggaattcatggtcgcaaacatttagcgatggaaattgtggtcgcaaacatttaacgagcaaattaacgacggaagtgatttgggcgtgtttgacaattccggatttcaaattattttaaaaacggctattttttgaattatttattaaaaaagtattatttatttaaatttgccaaaagaaagtaccttttaactaaaattcatttattgaacgacatgcaacatattactttattgctaatgtagttcaaattaactatcatttggatggtttggacaggtaacagattcaacataaagggtgtagctctcaatttttccccctaataaacattgaatcagctatacagattttgataatacttaaaattaagataactcgtccttggagctttggatttgtctcttttaaagtaaacaactcaccttagaagataaagtaatatcggtcgttgataaaaaaaaataaaaaaatcaattgttaatattatgtttatggtgcacgcataacaaattaaatgcgttgaaatatcaactgcgaaatttcttattaacaactgaaattacttacttttcccctactcattttagaggagtcatgaaaattcagacttgcattttaccgtgttcaaaaattacttataattaaatttttcatggagatttgtttttaaaaaatatacatttttcgctaaacaataatcaaagcccaacatgtaccatacagaagaggtaaatgacgctatcatcctcagagtggaaaagacccaaaaagaaaaacaatgtgaggtgagattgtttttcatttctataccgttggaccactgctttttctcttgggcttttgtggcccttttccacttgtattgaagaccaatactaaatgttacgaatagatttcgtaacaaacacgcgaaaggtgttttctgcctaatttttctttatatttttttaattattttaaggaaaataccatttgtgcgaattcgtaccgcacggattatctatacaataactatctcctcctgaattgagtcaaaagcctagttttttttataaaaaaaaattcaatatctatccaattatatttaaacaagtagattcgtagtaaaaaaaaaaaaaaatcgcactgtatagcatcgctgttattttaatcaacatttatttttaaaaacactgcaacatagatcttatgcttcgtgcgcctattttctcgtacaagcagcagcatagttgtccgataactggatggacttcccagaggcaaaaatcttttcattccagtatggcaaaaaaaaaaaaagaccctcatgtaatgcaaggcaactacgatttaaggaccataaaaagggttacttgtttctctgttaggtttgctgcagctttcttttgcaggtccagacacaacagtttctaagcaatgttccccaacagaaatgtcaagggtaaaaaagttatgtaatatggtagatttaagttaagatgtggaattattctatggatctgtttgtttaaatggttcaataagatgatcaagcgttgaaggctcactgtgactgatatcggagttcgaaggataagatggttttttggtttcttgtcaagtctctgtcaatgtcccagtgacgacacaatcacggtaggttaaaagttaaaacagatcagaataacatttcttggcatagccataagaagattcaactgttggatcttttcagatgataacccaaataccctaacttaatccacactcccgctccttgcttgaaaggaaacgggagtttaaggataatatggttaaacctaccaaacttattccaatttagttttcatctgacaatttccgtcaatacaatgtggcccggctatacagctgccagaactcatcactatcttctaaaaattatgccaaaccaaattgtactaatctctgaaatggaacttaagcaacaagttattatgatgtactaaggaatttcacaactgagattcaaatcctcagggtcaatgggtgaatgaacactaacctgaatttgagtgcaagaccaaaacaaaaaaagaaaaagagaattgtcccagacagaactgaaattcatcaagcagacatctcttatatgtattacaattccttgacaaacaagccaatctcaataactaccagataaacaagaaagattgcagtcccagcagattttatgatttccattcatcttccccaaatttcttcacacttaaaatgcatgatgtatgtaatatacaaaacaaggcatgcaaataataggtagaaaaaccattgaaatccacatttcgatttacataacatcttactggccagctgatggatttgtcaacaactcaagggatttcttcaagtagtctactgcaattgagacatcatcaaatgccagtgccccaacagcaaatcttgcagccttgtgtgcttctgctattttttcaggtgctggctggtagttactgtcatactggtatgtctgagtagttgacttaggttccacaacagttccatttctgctgctggaactgtgttgagcacttgatgaatggtttgcagttagcggagccgactgggaagaatatgaagcatctgacccttgataataagtataatttgatgggacagagggaaggctgctttctgtaaaacttggataagactgaaaatggggataagaaaaagaggaagtttcatgagaagggtaattaggatctaaatgctgtgaattctctggtgagtattgctgatggttgtagggctcaggataagaactttctgatctggcaggtggaggatggtaatcttgggaaggtggaggaggatgataatcttgggaaggtggaggaggatgatagtcttgggaaggtggaggaggatgatagtcttgggaaggtggaggagaatgataatcttgggaatgataatcttgggaaggtggggtgggatggtagtcttgggaaggataaactccaggtgtgtaagagtgagatgatggagaaacaatggaagaatgcttgttattatctactttgtcatgaaaaggcatagatggtggaatatttgcagaatgttggtcgttaccagtatcatgaaatttaggagcaggatgaatgcttggcagattctggtagttgacagggctatgataactacgtgatgaatcagattctggtccaggactggaaacagtagtttcggtagtcccaaggtcctgcaagaataaacagctcaatgttaattgtttatatttattaatgaatttatttatatgtttttttaactgatcaaacccagaagacaccaggtgaagttttgaatcatacatatctatcacttgaagaactcaaaggaactgagaggtcctcatcaccatcaggggggccagcagtgggcttccttccttctttcaaagcttttcttatttcagctgctttccacactgcatatttctgtttctgctccagctgtaaaagaaactcaaaaaagcattaaacatacagttacaggaagttgtattcttgctgcaaattgtttccaaataagaaaggctttgtggaaaacatgcaaatgcaatgagacatgcataaataaggaaggttcaattctatgcatgaaatacacacatcaggctgaaccgctccaaattgattaagaatctcaaaaaagatgctggcagcataaaatgttttcgctgtattcctgcaaagtgtcaaagaatatacgttaaaaacttatcacagatgaaaaattcttacaagcaagatagttatgcaaagggttttttaataatactatagcaaatgtttggcaaaagacagatgcttggtatgtaaagagagtgagctactatcttgttcaagacaaagaaacaagaagatacaaaaaacccttgtaaactttactgagagtctgagaccatagggatcacagctgatgcaacagaaccaacatacaagcttaaaggcttatttatttatttcaagctagcattaaaataaaaagagtgattttattatacaaatctgctcttccggcacgatcttgcttgtctgcttttccaaacacattagaagaaaatccctcgagatataaattgtcttcaggccccaactgaattgactttttatcctgtaaaaacaacatatttcagatacatcaattgagtaaataaaaattccataatcatacccaatcaaacatgtcaaccactaacatcttcaaaggaaagaaaactgcagattgccactgaaacatgccatagtatcattaattcattattattcacattcagacacttccatttaacatgagcagattcccttcttattttaaaaatcaacacaaagggatccacgagattaattaaaaaatcacttttatatttatttatttgcggatcacctttgagtttcagttaattgtgattacagtcagcataaaaaaacaacaaggtttactttagaaccttttcaagctgcttcatgagggaaaccagaagagcattagtggtcttcgtgcgctcactttgcggaatcttcagcccccgttccatagcatataatcgacctaattttaccaaaaaaaatatttcatcgtgataatttataacgacgattagagtatttcagatcagtgaaacaacaaaaattgccataatgaaaaataggtatcgatctaaaattaaaataaaagagagaattacagtaataagcgacgagtggttcgtgcttttgcaattcatcagcgcgttgaaggtatggtaacagcagcttcgcgggttcgttctcgttcgccatctcaattctcgcaaaaattcaaaacgcagaaggtattggaaaccacacgacgtcgtttgttggctttattccaaacttatgccttcgaccgtctttccctgccaaacaacaattaaggaaaaaaaaaaaaaacttctcagctaagaaaaagtaattgctgtgataatttaaaactgaataaggaattataaataatatattatgttatatttaaaaataatcaattcatatgttcgtgctattttttattttaaattatcaatttagtcatttgcaagatcattgatgaaaaggatgacttttagaagcatacaatttaatttcatgaattcagttaagagggaatgctacacattttctttgatattctccatcaatgattctgattgcttagaatttattaaaaatcattaattttaataggttttgttactcattcaatataaattagaagaaaaaataattaaatgataaataaaacctattaaaaatggtaatttctaatacattctaacaaattatagagagaatcctataaaaaatgtgtgtgtgtgtgtgtgtgttgtgtgtgtgtgtgtgtgtgtgtgtgtgtgtgtgtgtgtgtgtgtgtgtgtgtgtgtgtgtgtgtgtgtgtgtgtgtgtgtgtgtgtgtgtgtgtgtgtgagagagagagagagagagagagagagagagagtgtagttagcattattcttcaagtaattagatattcatttacgatatgcttagctactagaatatgagaaaaatagatgaaaaattaaaattttctcttcttcaaatacaaatcaatgcaactcaataaataaatttagggggctagagaggacaagaacattttactattaaaggtttaattggactatttaggagttagtattaagaggaaatatttaaataatttatgcattaacaatataaaaaattatattattattttatcattgacatgtctgaaaaggtttttttactttttcaataataataaaaatgagaaacatatattttaatcaccgtatttagttaaactttattttagtctctatacttttaaattgatgaatttattccttcaactttaaaaaatgaaaatttaatccctcttcttgtttaaatttaacatttagtattaatttatatattttctaaagttgaagggctaatcaatttgaatgtacaaggaccaaaactaagtttaaccggtacaaagataataaaaaatcctaagaaaaataaacataccattcatacaaactaaactgttattaaatgttttagaggttttaaagtataagtaaaataagttcaaataccactaatatgttgatgattcccaatgggtagtacaaaaattactcttgattgataagtaattacccacttaacgagaatgatatttaggatttagatacaagcaatacgaacaaattttgacggataagaatgcagatataagtatcttagtatcaactctaccattttcaatgcattaagcaggtaagcaaaaataattattgttataaagattattttgtatcgtcaattgaactttgcacatcactcaaaactctaaataaccaaatctcaccactaaggacatggtttaactagtacaaaattgtctcatattaacaaccgatcttgagtttgaatcattagtatttatccatttaatactcaattaaagaatgttattcttcatagtaattctatcaatctcgagcaatctcgagccaaattgtcacatgtcacatatgaaagatacatggaatttctaaaagaaaaaaccctttatacccttttctttttgtaggtaattaattttatacaacttgaataataagtaacatttgattaataataccccatgcttgaaaaatactatgcgattaggaccattttattgcttgcaccgtcagtggaaataattaagaataataggttcaaatatataaaattaaataatacaatatataaaaatatgagagtagtgaattcaaatatataaaattaggggaacaaaatataaaaatattaaataattatatgtatttttttaaagtgaagagatggtatatacaccctccctatgttggagatccgagatctgccactgtgccctgtgacttaaatatttatgaaaacccaattgccatggacatgatgctgaaaactgaaacatctcacaaggagaaaatgtgtgttcggaaatttgcatttgacagcatgaagccggacagcgtgagcaactatttgttgcttctgcattttttccattctttgacgtgaaattgcagggtagacgtgcatatgtaacatcatttttttaagattatgtaacaccatttcaaacactgaaagtgaaacaaaccaatgaatagaagctagggtttggaaaaaggcaagactagcactgaagactgtatattttcatattatagggcatatctattgagaaaacctccaaatggcaaattgaacatacacagctcagaacagttcctctctaattacttgtcactcccatattataattcctaaagcactagtaatttgacaatgctacaaagatgaaattatagggttgaaaatgaagatctcattattagggtgatgccgggatgggttcagtaccagaaacatgggaagcagcatcttcttttgacatggccacataattcacgggagcagatagtctgttttccctttttccatcttttgatgtggacttgtttccattttgatgagcattaagcgatagccgtcggttaggagtaccattggctcctccgttagcacgaggacctcctgacttactggaactaactggcctagcagggctgggtcttgaaccaaagatggtttcttgttctgtgtttcgctgctcgtgatgctttttctgatcctacaaagtgcaaagtccatatgttatgacctctccgtaccacagtatgtataacaaatatagaatagtagtgaacaaaacagaaataggccaagctgatagttttaatttcctcgcagagttgtggtcttattactattagcaattgctcaaatcaagctgaaaatgagtaatcctaatcatcttattagtgaaaattaccctcatcctccgtttttcctcttcccgttcatgtctgagcatggcatattcatctaacatggcaagaagaggaacgccatcatatgtaaatgacatgccatgatcttcttcccatgcacgagttttagcaaccaatgtatcaaccaaagctgcattttcaccaacagaaacaaaattattccaataatgtggcatcatcttgttttgcttacactgacagcagattgaattaataataacagtatctgatggtgattgtaatctcattcaacaaatacctggaattttgttgaccaatatccgagctttctctgcacgtttgaggtttatgtgtgcacctctgcttgcattatacctgttctcatcctgttttacaaggttgtgtcagagtgtaacattataatccaaatgaggaggattaggcaaccatttaaagatcataacttgcagcaaagctaatgctaaaaatctaaatatttccggaaacagggaaaaaaacatttcaattatcttttcaaataacaaatcacttaaactgaaaactagcagactatataataaagacggatacagattaactctggctaaaggatttacaatttttgttaacatgatagtaaatgttcttatcataatactactacatcacctctctatccacggctgtgcacaaccaatcattcaaactcagaaagagaaataaagcagaagcgagattttaagtacccggttatagtcttcaagccaactctcttcttcacatgctgacatccatttctcaaccttgtccaatatatcttttcggcttaaagcttcttcttttgcttttgctatctgattgtccatgtcagccagtaattcagttggttcaatgtttcctgaatcaatcattgccataatcttctcccgggcagcatctggatctacttctatatgagcacgggcaaatatctcttcaagctctgcctgcttcttgaaagcaatttccttcatcctgctggctttcagctgatcaagtctctcaacttccacttcagcctttattattcaacaaaaaaaaaaaaaaaaaaaagttaataacatacttggagctcgaatctgtaaacttcagaagttctgtagtacctgctcaatcagatccagagcaagggcaccaggaacagtgacttcatcaacagaagctgacatattacaggtaacatgatcaaatagtctcctttcctcgggatgagtatccattagattccaaagatcaatcaactgagaagctaattcttggagctgcatgaaatatccaggtcaaagtaaagaaaatggtattagattaaaagtcaagcaagtaatgaatgcaaaacattttgtcggtaatatcactctggggtgtcaaagtcagaattgatggtgatttcttgaaaacatacacatgattagcaagacaaaaaccacagtatatcaaaaatcctaaaatttgatagcttatacagttaacagctattgcataaatgaaaattaaggggaagaaatgttctaaatgcattaccttgtgcagcctctgttttttatcttctttcagtgttaagacagtcttagccagccttgctagggtgtcattacttatgctcttcgattgaacaccagtagagtcatttagacttggatgaacctcagttacagtactgaagaagtccataccaaggacagcacatagatcatgcacagtactcacaaattcaagaaccttgtgcaacctctcgctctgccaaacaaggcaatgcaacaaaactctcaatgagctgtttagtgaatgaaatcaaatggaattttccaaattagtgacaaactgaaatgacacattattgaatattataacaaaattaccttttccttttgaagttcttggagctcagattgatattcatctaacttcttcagggacaggtcagactcatcaactgcaggtgaaacatcattaaggttcaagtttccggctatctctccacatatttgttggatctgtgactgtacatccgagaactccttaattctttcttccttttgttgccataactgttcaagtaccggtgctatagctgcaagctgttctttgatagttccagaagtattctcaggctgtgaaagaataaaaaatatgcataggaaattagtttgccactttactaacaatataagacatagtcaggtagttactaacaattccagcaatgctcttttctccaagtgctgatagaagagtggaaagctcaagcttagcatcagacagagcttgaagtagctgcgcccttgacttggcagcctgctcaacctttctcttgtacacatccaagcactcctgctctaactgaagaagcatcttgtctcgttgctcgtcgctctcaccaacctcatcccatatttcctacagcgaataaagaaaatgtaattacttaatcccattattctgtagagcattcgcatcttaagtgacacagatgaactgttgaatgaagttagttacctgaagcttttttaacaaggaaccacatgtgttttctccaagaagaggattttgagcttcggtcactgccattgaagtcccagcgacacctagcctgcacctcaaaatataaaaatgacatgaaaattctttctgcttccaccaaacgcatagagaaacatttcttctcttccatgaagatcaagaaagtagaagacatctgctataagacaatgcaaatgcaattaaagcataattaaatgcaaagccgtaatccatcgtgggtaaatgttgaattccggtaacccaaaattacccatcccaacaactaaactaacgaattcaaataaggatctttgaagagataagccaaaaaaaaaaaaaaaaatcttaatattaataaaaataataattaattaattattgttaaaaagtaaaaagttttttaattgcatctgtaaagaagtcggattttgttcattacatatgacatgatcataatccaatgcagaggtaagctaattaagctaacgatcacaacagaatgaaatgagtcgacgaaacggaagctataataacccaatgatcagcaacaagtagcaagaaaatgcgatgatcgagaaaaaagagagggaaatgttcaccgtcaagctaaagaaaagaacgaagcttgaaaagaatagacgaaagaaagaaagaaacgcagcgtagaacaagaagttgagacggagctcacttgcattcacagagcaacgaggaagaagcagatcttgggggatgcggagatcagacgaagaagaagaagaagaagaagaagaagtcgctggagagaagaatgcgtaccgtttgaaggttagggttatgtggcttcagatctgaaacagagcgtgagcgagtgagttcgtgaaagagagagaaagagagagtgaggttgtgttgtgtagagtgtgcatataataatggggtcataagaataagattagatgatgagatttattagaacgaacttagatgatgcaaaagatagagtacagtgttagtgtaggaaaacaaaatggacccacaatgactatctatgatctatcttttcccttgtctagttccaagtcaattcgtttcttgccccaactcttcccccttatttacgatcatgacactgtgtctaaagtctccctcactcttcatttttttcaaatgttaccataaaaactttgactttgactctcggtctgtctaatgaattttatttaagatttaaatttactctcaattcaaaaagttgtgtattcatggaaaatttatagataattattagaatttaacttttatgtgttgtcggtataaagatttttatacagtctaccaattaaaaaaatatatatgtttttaaggatagttattataaaaattaataaatccttcatacaaacataactaaagcctagaaaaagaaactcgcataacaagaaagctgtcaatgggtgaggagaagaatctaaaacagtgaatatatctgatgatgatgatcccatatgaactaatcgatatatatacgcattgctcctcttctcgatagacatggttaaaacttaggacccaaagtctattcttgaaagattgaatagagtttatcaaagcagcatacgaatgccaaggaggttgatcatgattaataagatccaaagccacaagtgagtatgattcgcattcaacaattaaaagacaatgtttaaaaatttacactatcaatgtattttaattactattattgttatttataataattatcttactataatttattagggtcttattaatcagtatttttatgacattgtttaaaaaattaaaagaagagaatatttatttgtaaaaaccattgaaaaatataaaaaatcataaacaatacatttttgtgtattttaaatttagtaaaaatttagtttttaattttttaaccaatgcatcaagtaaataacctttctaaatttattactactatcttttaatatttttttcatattaataacataccaccttcttataactgccaaaatctaagtgtgtatttgcatatatcggctaaagtcaaaaagtgcggcctctcatattctgttttgtgagaagaaagtatttctattttctaaagttaggaaaaggtctgtttgggatattcccaacagaaaaacaaacacaggcttaaacaagagagaaatcgtttatttccatccacctaaacacattaccaaaagaatccattattcacttctaagtacagggtaagttgtttacggaaaagcaattaatgagcatgcacctcaaattgccattttatcacattacaaggcaactaagtattgcgccatgctcatgtcacagcaccagttatggggtaagcattgagctactattcaatttccgtgggtctaattaaaaaagaaagaaaataaaatgcaaaaataatatgaaatgcttgtaaaaattactatcaaaagccagcaaatagttagaaaaccatagaaaacataatggaattgataaaaaaatttgcaaacaattaaattagaaatcgtaaaagtgtaaatagttaattatgttcgagataaactcaatcgggagatgtttcaacttatattcctaatgtaatttccattacagatggccaaatattcttatctgccgatcttcttcccgtacagagtctgtcaaactccgctgtcttaaatgacattggcgcggtactctgatatgagtagatcagatcaatcgactgttccggctaatcacgtcacgaaatagtagttactcccagcccctttcctttacagaagaacaaaaaagtttattagttgcatccgaggttcaaagccctgctcatagaaggaccaatcttgtgaaggacgcagagggctaattccttctcgtcgctcaatctggagtaagaagccggctaccagcacgagtgtacacatcttgggattcaaaagggcttctgcttccctagtgaatgtcttggtagaagatatgatttctttgaattgaggtttattcgtctttaagtaagcacgtaactcaacaagaaatttcctgtcgagagttcggattgctctacctaagtagaacgaaaagaaggaattggaaattcaacaacaaagggagagccagaagcttcgcttccggtagggggatattagattgattgtatccatatggggtaataataaaagggggaggagagcttaaaaaaacaagatagataacaaataaagtagaagtgcgggaggtcaaactggagattcatattgatcaatcgatctccgcgtcctgccagttcgctaagtagactcactctcccgaggggcaacaatggaactcttcctgccaaaaactaatcataaacatttttataaaaaaaaaaaataaagattgattaatattttatgaaagattatctccctcactagactcaatcttctatgatactctacctgcaataatgatttattattttgttttgaaaccatgtgcttattttttagggattttgaaaccatatgttggatgtgtgagaatgggtagtcaaagcataagaacgtggaattgcaggctagaatacgtccatggagtgcaataaaggccaatatcgttataaaatttaagggcaggggcaattgctagcaacaaatgggggaatgttaccctttttctaaaaaaaattgtgaataattatttaacctgaaaaaaagcagaggataggaaaactccatagatgggcaaaggcaaaggtcgcggtcagggatagggttgtcatcacgaatccaacacgtctctgtccaaatgagtaatgacagcatcaatgtgaagctacctatatttctgtttagtgtataatatataacccttctgcaacgtgacaacattttcatttcatcactttccttggaccataacttgcattctcattattctacgtaagccatccattatgagaataattataattttatcatcaattgatcatgcgcgggatagcctctatatccctacatataaatataattgctgcatttgggatggcctacgtttcaggccttttaatttattcagtaatatattatgtatctatcattgcatgaagtgcatatgatatgaccccaaaactactacccctggtgcaaaattcgaatttaccaattaattggatggtttaaaacatgaatcggtgtataattaactggtttgataataagcttatttaatgatattaataaattattggttaaaatgatattgagcttaattttattaagtaatatcttatgtttgaattttgtgaatgaaataatataattaaaagaaaaaatttcactcaaaatgatcaatcaatttttaaaaaaaataataattttatcagtgaatactccatcctcgtaacatgattaaaaaaattgatctgactctaattcatatatgtatgtgatcaaactaactaaattaaagttataaaaaaaactaattaaatgaaaagctaagaataaaaatcaggcaatgattcatttatgcatgcataatagtagagacgtcacacttcgtccatcattttttccacttgtatattttcttttattttcttccttttaatttaagacaaaatgaaagggcagagacagagtggctttcaaatctcatttaatttatagagtagaaaacaaattattgcttgtatatcaataataatactatcctttttcgatgtggcaatcatgaaattaaaaattggttacatgatcatcaagtacataactgaggtaagccgtaagctttttaatttgaccaactgtgtgaataagtagatgagagagtacagttttagttagaaaaaagtacgagtaataaattattagctcttttatcatccaacctcccactctcaccaatgtccgtcgaatcagttaagtaattaacttgaatatgaacttaaaagacacaaaagttgtgtcactctttaaggtctcacggggatcgctccatagtttaggatttatttgataaagtaatcctttcattcctcatttatgtttttagtttttttaaaagttttattttagttttataaagtatttttgttatattaaattaatatttccgacaatttaccacattaatattattaatcatggttgatgtgataattgtcgattcctttaaataaactaaaagaccaatttaatctaataaatacactttaacaagctaaagtaaaactttttaaataagatcaaactgaaacttaaaaaaaaaaaaaagaggagagtctaaaaaaaatattttatccttttgtttttctttattctggataatgatatttaaggatttttaaatttaagaattaattattgtgtagcttcaacattagaatagttgatattgcaattcttacacaagcattcgtatttttataaacaactcgttcttaacaggtcttaagaattgtgagacaaatgtataattaattttaaatttttaaaaattgtacaagtgaaattgttgaaattcttcaatctcatgtaatcttctaaaacccactaaggaggtgtttggtacatattggtatatatataaataatttttttagttgattatagatatttatgagtttttttaaagaaaaatataatatttttattataaattttaattattaatcacattaaataatttaataagaataatataatatttttatcacattattttttttataactagagtaagttagatttctaatttcccgtggaaacaactttatggaaaacttagcaaaatttattcacggacaacatttttttcttctagaaatgttacgcaaggttctaaaaactaaaaacttcttctttatcaagcgtctcctcctaaaaaataagatttagctcaactaacgtacagtctctaactttagagaaaccaaatcttacaaaataagttagagagtaaattacaacaatactcattgagcttttattaaattacatataatcttacccttttttattttcctacattaatctctttatatttaaaaatattttactaatatcatcttatatatgttggataatattattctgatactccctaacatttccttaaatcttaaaccaacactttctattagaaatatgaatgtaatagttaaaaatataaaaaatatttatataattacatgaaatattgtgaggtattattttaatttgttccaaattagacaactctatcgtaattacaatattttagatggtgttacaaacatatttccttacatgttttatacaaatctatcattatttatttttctctttttcacaaattctctttttttctctatacaatacccggtttaaattttctgaggtctacgataattttctggttaagaatcattatcattttattctgatatgttatgaattaagggtgtggtattttatttacctgccgccaaaagtttctatttagaccatgtattttactttatttattttagggtgtttatgacctaatagttctaaattctaatggcgctgtacaattagaaaagcaaaaaataaaaacttaagtgggaaaagtcgtcttccatttcccaaatagacgacttacactacctgggttatccttattagcacgaatgttaccaagtaccaacaatggtcttctaaatataataaagcaaaataaataaattattattcagctgttacccatggttataacatgttacccatggttataatttataaatagctaattaaattaatggttaaattcattctctttactgaagtcaaactccatcgcttaacttcattaatttcaaacaattataaaatatcatcactcaaagcaaaaccaaaattaaacccagtaatatataactttgttgtgaaacaactactgatctttactattctattaacggcaaagacattatattactcaataaaaataccagcaaattagttaaaagtaaatatgaaatccaaatttgtttggtatgaaaagtttccttcctttttgtaaactcgtaagatttgattatgaatattaatttttctaattttatatttactttatttaagtatgaattattttatgctttagtaattggtaaagttgtgctttatctagaataaaatatgaataaatatattttataactaagagaagagactaaatgtaaattttatataattcttttgtggaagtgaagtatatactagtaagaacaaagtaattccaaagagaattaaaagcttgaggggaccatgacacactaagttcgtctccctccctccacctaacaactctgtgttttttgtacttatctactactattctttagatagcacagtttcatgcttgttgctcaatacatggtgggtttagatttttttccaacacacgttatgtcctgtccgaaaatcaataatcaagatgccaacaatggaagacacatgtgggttggggccatgcaacatgtgacctacgcagggaattaatataataagatctggaacttgagaatttgcatagttgcatttgaccagcccaaagcacaatttctaacgcagtcacatgcatttgtattctcaattatttgctaatcatcgaccaaagtgaccatcttagctaaaattaaacagtgtggtttaattataatggcatcatctctcatgtgattgtattttattataggcacaaatctttgtaagccctgttcttgttctctctcgtatcatacctactttctttcttgtcgaattatacctacttccttgatgattaaatatatcgtcatcgtggacccaattctttggtttgccacaattgttgttacgccaactgaatggaattaatgttcgttctaattatagtttaatagaacttttgattagttagggcttttttattttattacttattttttaattttaggttttgatcctctaatttttagaaatgattcaattagatctttttttaaaaaaattatttaggtcctttattatttaaaataaattcaatttgatcctaattttcttttgtctactccaatatttttttttaaaaaaataagatcaaatttgattttaaataggatcaaattgaatccatttaaaaaaaataagagacttaacttctaaaaacaaaacgacctaattgaaatatttttaaaaattagagaacctaattaaaaaatttaatactaagaggatcaaattaaattttaaaaataaattagaggaccaaaataacaattaatccttaattttacgttgctgacaattaattgtagtatctctgcattttagaaagaataagttatttccaaccatttaaaaaaaaaaacaaaactgtaataattaggaaaatcgtgtctatagacacacgttacaaacacagaaaaattgataaattcccactaaaaatgtgggccgggttgggctggtccacttttataaagtgggctgaaaatgtcaatccaccccactttaaggtgagttagtgggccagcgggccagcccactaacccaccttaaaaatatttaataaaaaaataaaaaatatttttttaaaaaaaatatttaagttatacgaaaaattaatattaaattcatgcctgcaatcattttaataccttacctcacatgagatgatgagaacttgagaaaccaaaaacaacagaatcaaacaagtcttgcaacatccattgaacttccaagaacaattaaataaaattagaatgtgaaatatttttttaaaaaaatattgtttaataatattttaaaaaaatatttaagttatactaaaaattaatgttaaattcatgtctgtaatcattttaatactttacctcacatgagatgatgagaacttaagaaaccaaaaacaacataatcaaacaagtcctgtaacattcattgaacttctaagaacaattaaacaaaattagaatgtgaaatatatatgtaaaaaccaacctaaaatccatggaaaattatatgttattagagtctaacactagattaataaatgaaattaaagtttacaaagcaacatccataattccatacattaaatttaaaatgtaaaaataatatttttttggtgggccgtggcccggtgggctggcccggcccgtcccacattttggcctgcgttttagtgggccgggttggtccggcccatttttctaatgtggctcgaagtgtcaacccaacccacatttttttgtgggttaaacgagccggcctgccgggccaggcccgttttaccaaggctacagtcatagtcgcaagaccaattatactggaaaaatatcacagttaattttttggtgaaatctaggtaaccattcagatttcagacgagaattctctatatggaattgggtatgtaattgggttactcatgccttgactccttttggatgttgatggcgttgtattgtccctctaaactgtctggttacttcttgtaccctgttctaatattaattgaaaagttaatctttgcctaaaaaaagttttgatatattaaaaatcattactatattaattacacgtacaaaaacatgaccaagccaataaatattattttgtatcatatttcattatctaagaattattaagaacataatcgtaaattgtgggaagaaccaaattaaacaaaattttaaagataaaaatcaaattaaatttaaataataaattctttaacttttataaaattaccttaaaaaatatgtaaattgtatgatatattataatgttaaattttatttcctataattagggatggcaatcaataaataggctttgagtatgatactataatatacaccctaaacttgtcttttagaaaaattcttatatttatattcatactcgatcgcgtgaataataactttaatatcatgccgtttttttggatatctaaatgttcataatcatagccattatccacattttaaaaatagtttattttaaaccacaattataaatatttattataaattgtaatcatataaaaatatttaggctaaaatataatttccatcatccacttttaaaaaatttattattttagttctcttattttttaatttagacatttcattcccttttaaaaaaaattgtgatttatcctcccatggctaatttcaaacattgaaattacatataaaaaggataaaaggtaatttacaattgttataaattacgtgtgaaaatgagaatttttagatatgaatgaaaattatattacatatttctaagaatagtatttttatatatatatattttaagtttagatttatttattattattttaaaatatattaacgttaatgatgattaaattatatattatgaaaatatatattatagattgtattttttgttagtgtagtttgatttaatattaaaattcatattatttaatttttgccttatctcaattgatttatataataataacatgaattatgttaaaaaattatttcaatcaaatcaattaaagttacacgtaggttctcatagttattagaaaaattattttttaaaataatataatttatagaaattacgaagataccatgtgtaaatttccttttcaaaaacattttccgctgtatatagtatagattaaaaatgatagtaataataatatatatttatactataataatatatattatagtataattttattaaaatttgaaatgtaaattcattaaattaaattatattagttatattatttttttaatatatattaaatcaaatcagattaattattgattcacttattcaaactcaatgtcgtaagacttattttaacgacattgctcattggcatcgagaaggagggtattattgtacaggacaactatagaattgactagtttttttgttttaagttccatgaaggtaattaagtattgttcatctgttaaacatgtcgtgttacttttatcttttatagtacattttatgatattagtaatagatttatatcataaagtttttatatttattagcgttttcagtaaccttatgggtctggacccgtcacttagtataataaagtaacccacgattattactggtcaatgcggaccattacgtatctctcgtagttaatttgttctctcctactatgtcttgtgctgttaattctcgtttccccgaaacatagcaaagccacatctaacatcataaaaaaatttctcaattcgtattgatccttttgtcattttttacctcttaaatccaagtatgtactcttaaatttcaatctgcttctccattctccattgttatttcttttttcttgatatatagtttccattatttcgttgttagaatcattatcccatttctgttttgagcacatgaaacttgtgccttacaagaaaaaagggtttcgattttgtgagtgtgtgacaatcaatgatctatttttatgtaactttaataactatatgttgggcacatgcttattgtttcaaaaaaccttgaatcaaccatcgaggctcaaactaataggtcacattgttaaattttttgttgacggacgcatgcatgcatacttacatcatcaatatcattttgtacctagtgtccactaatttcgttgcttattatactatattgttgtgtatttaactttcccaattatgaaagtgattatgtatatttagtatgagtgctgaattttgaggatacagccattttgatacattaatatgaatcctattagggatgtgtcgtttgcttttataacttttgccttctaatgtctcagggcaggtctcagtccgtgcatgtatatcactccaaaaatatttgaactatcacttcaacaatgagagatatacatacggatactaactgtagttcaccaagaacgccaaatgttcgacaaagaagacgctcaaatgaggttgatattaactgtagttcaccaagaacgccaaatgttcgacaaagaagacgctcaaatgaggttggtgtagtaaaataacatgtatgcttgtttgtgatcggggatacatttatttcaaatatcaagtttttttgtgaatttatgctgctgcaagaccagttatctatagattctgtcaattcagaaaccatttgattatgacaatatgcacaaaattattattcactcctctacacattatttcttatctatattatatccgagctatacaagacatgtatgaagagataactacgagtgtgagaactccaagagttgaaacgaagaactttcctattggggtaggattatatcacggctcagctttaagttcttgtttaacatagttttggatgtgcttatcaaggacatacaaaaaattatccctaattgcatgctttttgtggatgatataatcttgattgaagaatcaaggaaaacagttaacaataagcttgaggtaaactttggaaacaaaggattttcacttagtaggaggaagacaaagcaaatgcactacagttttagcaagagacacgaggattttggctcagaagtaaaattgggagaggatgtcataccataggtttctaattttaaatatttgggatctatcatacaaaatggtggtgaaattaatgaggatgttacattagcaagatggcttaaatggagaaaagttttagaggttgtttgtgatcgcaaagtacctaccaaactcaaaggcaagttttgtcgtatagttagatgtccagccatactatatgatagtgaatgttgggtattaaagggacatgagagaaaaatgaaagtagcaaaaatgagaatgttaagatggatgtgtggtcacataagaaaagatagaatacggaatgacgttatacaagagaagattgatttagtatccattggggaaaaatgatagaaaatcagttaaggtggtttggcatgtacaaagaaggtcacaagaggtgttagttagaataactaatttttcatgatatttagtccgagaaaaagaagagggagattgaaaagaaagttggaggaaatcatcaagaaagatcttaaacttaataatatttataaaattttgatttttaaccgtgtcgaattacatcatgtaatccatgtaaccgacctcacttagtgggataagactttattgttgtggtatcctaatctaatccagctttatatgtttccaaagcttattattattgatccatttggttggcatttcaaatgctattttttttttcttataagatacattacatgcagttgatgaagtcattattgaatatgaacttcccattaacttatgtatacattatttatcattaatcaaatactgtagaaaatgggccggggaaatagaagaagaaaaaatcattttaaagaatttgaaactgatggtttttgtgtcagattcctgcagagataagcaaatcaaatggaaacaatttgcttgtcaatgatgaatccaaatacaaatcaatgtggatccgtgcatactcatctctgtggatgctagcgagtgtctcactaatcatatacttgggtcatctttacatctgggccatggttgtggttatccaaatatttatggccagtgagctcttcaatctacttagaagagcaactcaagataaacgtctccctaagtttaagctcttgaactggtaagcattcatgtacggtaatttctaaatgattatttgcatatgagaaatgtttagtttaatatatagtgtttcacaaagatatgattctgaatgcaatgtccaggcattatttcttcacagcaatgctattcgtatatggccgtattctcagtcaacaacttgtgaatacagtgacttcagataaattcttgtatagatttgtgagcaacctgatcaagtatcagatggttatatgctactttttatatattgcaggttagtacttccaaatgttttattcataattgtcaccaaatttggtaagagagaaaacatgaataattataataaagatacctttaggtcctgtctttgttgggcatattcgtcataaatctgaatcaatcctgttacgtaacttaattttatctaatatcctgttaacctagtcttctgcaggttcaagtgtttgctgcctgtaatttcaaaaaaataatctttcattcttgaataagtcatttcatctgtgatttcaggttttgtatggtttattctttcattgaagaagagatattacaagtatcagtttggccagtatgcatggacacatatgatacttattgttgtgtttacccagtctgcgttcactgtagccaacatatttgcagggatattctggtaacatgacttctgttatattacttgatgatgaaatctccatcatctaattccttcttttggtttattttttcctattatatgtgattttagcttacttaaacatctttctaaatatgattctacgcaatctagcttcatttacatttgatcagaaaattgtagaacatagttacttacagaaaaggatacattaaatcaataaacaagaaatagtctcttaacaaattctttttaataatttgcatcttttttttttttttttttttctgttagctttctgcctttctctaattcttgttttcattccaacttactgtatggttgtggaaaaattatatttttgcatacatttaatgtattgaaaaaaatatgttcaattttttatatgttgactttgatattgttatggacatgagtaaaaggataatcagatataataagtggaattttagtggtctttgaattaactatgttgttgctcaaaaatattaaaaatgtttctattaaatttgtggtttgattgacttgtacaaagatttctcattattaaagaagaggaagaaaagaacacaaataacgggactctttataaacatggcatcatgattcatgaaatttacaatatgtctattgtttttgctcccaaagaggttcactttcctgcaaaactaccatctgtgtgtatcctcactcaatggaaattctgggttctaatacgagtaactgctttggtattgccaaccactatgtttttcatgctttaattgattttattttttctagttacaacctaacatattaatataatcatgcaaggtttcttttccctgcaatcctcattgctatgaatgatgttggtgcatattttttcggtttctattttgggagaacacctctgatcaagctttctccaaagaaaacatgggaaggtttcattggagcgtctgttgccactatgattgctgcatttacggtaaacatcagttagtgacatgactgacatcaactaccatcccaaaaagctttcaaaatttacaccttgtgtttaactcacaacctccactttcagttgatttaatgatatttttcagtatttttgctttgcatgatatgtcacttatgtttgtgcagtttgcaaacttcttgggtcgcttccagtggctaacatgtccaaggaaggtaacaatcttgattgggtgcagtcatctatgaggaaatatttatgctgttcctaatgatggtgaaataaattcaggatttatcaactggttggcttcagtgtgaccctgacccaatttttaagccagattacattccattgccaggactgatttctcattgggtaagtaccaaaaaattaaatctatcctaataattacaaagagatagcatttttgccactaagcttaagattaagaatttaagactaaagtttttcattttgcaacattttgtagcttccatggaaagagatagcagttttgccagtacagtggcatgccttgtggatgggactatttgcgtcaatcatagcaccatttggaggtttttttgctagtggcttcaaaagagcttttaaaatcaaagtatgttcttgctctttatactagacatttattttgcatccatcacctttttccattcactttgaaactcccaaacatagcaatagcattgatctctttgaatgattacaggactttggtgatagtatacctggacatggtggatttacagacagaatggactgccaggtttgctcatagatagatatttatgtactagaattatccttggtttatatctgaataggctattaattcagaatacacttttcaaattttttatggcattatagttagtcaataatcagtaactgctatgattgatcttgctttaagtatttgggggtattttctctgttttatatctaccgttttgttatcgatgagctaagatatcccattgtcttgacatgttaaagtgaaattgattcattactaataaaatttatatgccctcgctatatacaccttgtttcaatgctcagcgctttcaatttcaccataaatcatgagcggctttttatgccatgctataaagtacacaaataactctgcagctattgtgagagtctgtgactgttgtgttttatactgtgatgcatcctctgcagatggtaatggctgttttcgtctacatttaccatcaatcatttgttgtaggccaagactattcagttgagatgttattggatcaggtgagtctctagtttaagcaatttattggctaactttcattcatgtgaaaattagaggattctgttttctttcatttccaatattacacacataaatcaaactggatacatttcattatggtcattacccataggtgtaacgctcaagtgttttatttatgtagataatgaggaaccttggttcagaggagcagctatctctctacacaaaactcgggaagatattgcaagaaaggcatttatgataagttcactatacaattaatagagaatgcttcagttggtgttttatttgtagaagaagaccctgttggaacaagtggtggagattagtaaacaatctttttagacctctttttagctgctgaactatgttaagtagagtgtaccgatccttgcaagtgacattccttcttttcctttagggcttaacattgacactttaaagcagatttgtattgagaaatatattggtgtttttcaatactgctttttattagtgttatctactattgatttatcatcgaagtctcaatataaaaacttgtaatgcattattctattcttaatattctttcttcaaaattcaatcaagaaattttctcacaatttacatccgctgaaacaacacacattcaaatgaacatgcaatttcattttcctgatttgttttggctagtgctcatccctcacttagttatgtactgaacctttgcatgttctctcaaccattcaagcactttagctccttctagtatttcttgaaccttcacgaaagtaaaaaaaagatcagatcaattaatccgtaaaattaggaaagagagtttggcccaaaccacaaattaggaaagagagtttgttgactgttgtatatgcatataggaaacaatgaagcagccaaaacaataaacaacagtcaacaaactcagaagtatggcacaaacctgtcccttcacccgttcctcatcatattcttgattttgacgtttgaattcagcaatggaattctcaacctctttgacaaggtcctcagtagcaaactacaaaacatacaagcacaaatcattccaataagaaaaaacactcaccaattaggcagtttaattataatttataaagcaagtgatatgtgcaaaccaaaatattatttctcaatcacagaattgtggtggccctaatacccttgtaatctttttacaagtgggaaagattttgttgtcagcgtgacctgagcaaatatttagaatggaaacgtatcttaatcaaacatgctacctgcagattttcacgcctatatatatcaccaactgccagactctgttttatcaaatttgttatattttccttctgatgctcaagaaattcgttcacagccttcgagcttgacagagtcgccagctgctgctcatttagtttcatttttgcctgagagaggagttattattaatttttctttttttgcattaaatcacgaataaatgtaaaaatttggaatctaagtcgcctgattagcctgaaaatgatgcaacttgcaaccaatacctgtatttctaataggttggctccgtaaagctgccttccttgttcctcaaacaaggattgaggtatatcaatttctaccatctgaaaatgacaagatgcacagatattttgtgataaaatttacatactccaatgttttcttgcagcataaaattcattaaaagaattatgtgcaggaaagggccaaagagagggaatccaaatttaaaggtaacttgtttcataaatgtcagaatcagattttttctaaggatatacttaccaccatacttgatatgacatagatgatttacaagatacgttatgattcaaaatcaaccatgaggttcataaggaaaggtaggtcttgtcatcttattacagaaaattgaagtccttgataatcattatatgcctaccagaaaagcataataacaactctagtgtatccatgtcagatgcacataattatgcacaatgtataagcatgcatattgaaaacatgtggcaaggtatgttctaatctagaagacgagacaaaatcaatccaatacatctacttaatgtaatgttaccttagaaatctgatctaagatagcattatcagttgcttgttctctagctgtttgctccacctcttgacatttctgtaacaacaagtctttgacctggaaattcatgctagagaattttactctaaattcaactaaaaaataattccttaatttacttgacaatcgtacttaagggtaaaaaagtcacctgctccactgtggtgcatccagggagaagcttatcagcaatagaatcatccagctctggtaaatctctgtaaaaaagttctttgcattcaacctgttatacataaaaggtatttacaataatcaagatcagttatatatgcagccaaaggtgtgtttaagcaagctaaaaggaaatgatgagatccaaacatgcacctaatgttgtattcatgaaaatgagttgagcactgtgtacactatttagaaaatccagagtttgaatcctattcctattgagagaaaatatagtttaattttggcagagggataaactatcccctccaatggaaagcaagaaggcaatttagacaacattgcctgaaagttcaaaaactttccttctgagatgcctgttctcaagtttgaggtaaagggtgctaggctagagaggagtagtttcacgccaaaaacttttcacaacttctctatctaatgaatcactgattttggagtcttttgcctaggggcagctattctgcctacagacttctaaaaatatacaggataggtaaaaacttcacttcctttcctcaaccaacctatagtcgctgagatatgcacaatctggtttatgaactgaaagggattactagcttgactagcaaactggatgaaactctcaagatcatctagattattagaaaagtagatattcaaacaaagatttataactttcttattatttttatattaccaagcaaaagcatcatcacaagaaatagaatttttcataataaaatacagcagctactcgaatcattgcacaatcattttatatttatctgtagggatttgatttttgattttaggatcatgtatggaaaacactagaagacttctagctagatcacggttactgtatgatggggctacgactacacaagctgaacaagaaaggtaaagcttcatttcttgctttcatcctctttcttggaggtaaatgcaaagataaaagctggtattaaaatctgatggagcaacaaagctaggaccataaacatactaatgtaagaaaagaaagtgttaccccctcttttataaatcgaagacaataactctatcataaggagatgaaaaagcaccataaattgcatgagacatatggccaaaaagtatttattttgaagaatttggtatccaaaggaccaaaagaaaaaaactatcatgtcagatcatgtccctaaaacaattaaacttctttgattcagcattagaaacttacagtaaactgagcatgaacaccttgaagattttcttgcttccatgtttcaggaaatacaagaggaaaagactttgattcaccttgttgaattccaattatagaatcaaggaaacctggtaatactttttcaccatattctgtatcaaaattaaagcctgcatatccaatatagatttagaggaaatatgttcatgatgtactacaaaaagaaaaagacttgtatcgcttatcagtttattatcatccttcaagcacatcacccaacctttactttcagcagaaggaatacttttaacatttgattcatcttgatcaatggttgttgctgagatgtcgaggacaacaacatctccaacctgtgaacagcaaaaaaattgtagcagctggctaattttgggtagactagtcgaaattattaatacagatattaattatcaagataacaaaagtgtctgtatgacagttatttattagtatgagatagtaaagataacataaaaataatcagtaaatatccttcattgtatcagtcacaactaaatataaaacatacatgatgaaatctatatagtctgtgcttgctttaaagaacttggaagttttatgactaaaatgattcatgagagtttcaaatgaatagcatttctagtaaataatcattaaaaaattaaaaataaaaaagcaaatggttgtatgccagcagactggtataaattaaatttagtcacctgtagccctctgtcagtaaccactttcagtgcaccaatggacttataacgtcttctaaattcttgttcagatgctctgtgagcatctatatcactatctatctcaacaacaatctttaaatttttgtatgcattattatcgggaacccatttgatttctggtgcaatatcaacaaggacatcatatctggagattggagaagttaaataagtgagaatagttaatataatctgcctgtagaagtcgttggctttggctgacattctgacaatattagcattcttaatgatagtcttccttttctctatactatgtcagaatatagttttagtattacagatgcagcaaaggaagagaaaaataacgactctaatggaaaatatatttcaaaaagcttaacctatagattacctaagagacccaagagaagaatatgtctcctccatctcagaaaacttagtcactattcgtactgagtcctgcaaagcccttccagtaacctataaacaaagttaattaagaaatgctcaagtgtaagatcagaataatacttgatctaataatccactttattcagtaataaccttggagaaatgatcaggaaattataacgattttttttaatctgttgatcagtatcaagtcctcagatcaaaggcatttcagtggcacagattttaaataaatgcattattagatagcactgttaaatagacttaggtaacgaggaaaggtcatgaaccaataagcttgtctttcaataatgaagtaaaatttcaagatcagggaattattaacagatataattgcaagtaaacacaatgaatccaaaagtgtaaaaagaactaacatcaagagaaaaaaataaggacataaaaaataagaaaatagaaactatattgtaacataccgatgccatagcatgtgagagtgtcctcctcaatatagattcaatagtagccttctgaacattttgactcccaacataactaataagaatgctttctggaactttctttccagggcgaaatccagggatctgttgacttaaaacaatcgtaaattagctcataaagataacatgcagccctttggatgctgaaacctgggatccatgacaatctcaagtaaattcatatatgataggatagagcacatcccttaagattgtgaggtttagtaatccgaaattttcaatgagaggttttagttatagtttcaaatttagaaactgggaatcctcttgagtcttgacagacaaaataaagtgcaccgtattcacagacaacaataatttgatgcatatattttctttgagccagaatataagaaagacattacattatataattatataaagcataagtgtaaccccatagcacctttgcttgcttcataaactctgctatgaccctcttgtaacaatcctcacataccaatgatggcacgtccacatgcaatctaacctgcaaagggaaagagatgcaaaagtacatattcagtgatatgaattctggtccagaatatgtgctcacttgcttaccattatcttatttttaaggctttcttttgcaattgattaataatgcttgcatggaatttgaatcttctcctattgtttaagtaacaagatatggtcatgttgaagagaaaaatacaccttgcatatattttcacaattatcattaccctttataaattatatagcaaactacatatgattcacatatgattgttgagctgaaccaaactgagaaataaagataaaggaaaaaaaaaaaaaaaaaagaacatactctggaattgggttccgctgtttcagtgaccttcaattctgctggaagacggtcctgttctgtgccaactgaaactgaagaagaagaagaagcagcagctgagagtgtgaagggagaagaagtgtgaggagagaggaagggttggaagaggtgaatatgaggcgaaaaagatgagagtttaagggaattgaatttgaagggtgttttagtgttggcattagcacgaagaagaagagagtttgaagaggaagaagggttgaaaagaaggaaatttctgaaggtttgagtgcacacctccattgtctctcagcactcacagcagacagacacaacacagagcatgttgatcggataaaagatagatattgtctttttaagtgtttattttaaaatcaaaatgtaacaatttcagtaattttctggtggtcccaagtttcagagtttacactttacagttatagaatgtgtcaactgtcggataaccatgcgaggaagtttttttagaagacaaaaagtaataagcacattaaaaattgtgtacattttctaatgaataatataataaaagatacaatatagttgaggttacgataaaatatgatattaattttgttttttaaaaagttttatgttaatttgatcttgataaaaataaaaaaaaatatttttattggtaaatttcattagacactaataatatgtgattgacatatttatatttatacgtgtaacagatttttagcaagagcgttaactaaatatttgactttgataataagaaaggaatacattactctcttccattccaaaataattagtcttatattttaagtagatcaataaaaaataataaataattaaaagagaataataatttataaaattaaccttatattattattaattcatttataatttttattgtccattattaatattataaaggatataaataaaaataataataattaatattacattaaaaaattaaaataaaatttattttgaaacaaatttttattccaaattggtgttctacctcctacatttctcctagcataaagaccttttaacacgggctatcaaaactaatggttaatttcttctactcgtacggaacaatcaaacaaaagaagcatgcatctttttctttctttcttttttctttttttccactctttctatttttatgcattcaacaaaaaaaaaaaaaaaactctttctatttttattcttaccaaacatagaataaaaagtaatgagaatacgtacaaaagtaatcttatattattgtattatactatttgtttatctttcaaatatttaaactaggaacgttttctcctccgctaagatgaattagttaagtggcaagacattaattttgaatacattaaattaattgtccaagcagactgttcaatttttttttcgcctagctcttttatctcccttataaagtctaatgtactttttgaacaaaacaagattaagaaatattgtgttctttaaatttttaggatattttatgcctttatattgagttttttttctttaaaaaattcactttgagtttagatttatccgaacatggaattgatttaattaactattgttggatatatagatgagaaaatgttttctttttaaatactctacaacacgaagagttccttaaaacaagtatttcgattagattaatattttaaaatcctcctttaaaagtaacattgtctaagtaattgtccgaattattaaataaaatgttttttttataagcgaaaattattattagaagaaaggcaccagtgtacagaatatgagctacacgagtatcattacaacaaaatcctataccccgagaaggattccaccagcacagaagaagtactagtaattaaagatagagtgattataaatcattaaataaagtggtgttaagtgcttatataattaattatgtttatttttcatttaatagttttttaaaatattagaagaattatgatgaaaagatcatagaaaaagatatatcactgttgtctcaattaacattgaactcagtatctaacataaaccagtgaaatattattataaaccactagaaagaaaaatagtgaaacgcaatgacgcatgcggcatgcaggccatgcatgttggacttatttagtgagttagggatcccaagggaagttgtatgcatacgttttccatgttatcgttcactccggacgaggaggaggaggaggaagagcaggagcaggaggaaaagtgtaacctgaaaagcacggcttcatatatagtatgagtcctctctcaataccaaagaaaaacaaaaattcaggaaataagcttccatgcatacaccaaatcattgaaagttcaatcaggagaagaagtactaatgtgtcttggatgattcacatcttaggatcgtgtcggtgagcacattaaactatctatctatccatgtcattgagagtcctcacaatttggacccaatgacacagtcatcaggggcaggcgtgctctatcactaacctaataggtcgtcctgggtgcattcaggtgaagaatattgtttaaaagacttctcgctatgcgaaagaatattattaagaatatgttaatcaattcttttaacgcatgcaccttttctaagttaatagaattttctatattactaattaagaaagcagagtaaggagtacggatgatagaaaacttacttccgcagggaatgtcagcaccttctagggcttggcagcaggcttctgatggcggttcctttggcccaatgtgaatgtgtgacacaaacctgccacaattgaatgcaattgccctattatcaccgcattcaaatggtgtcggtggtgttcctaataatatgccttcagtttctgtttcagctgagatgccaccaagcaccaacattgcaaacactaagctccctctaattcccatcctcacacttaatttcaacttctttctaatccaaaatcaactttgctcacaaattggattgatgacagattattatgctaacaaccctacaattgacatcacgtatttatacaagaaacaaaaggaagccattttttaataaaataaaataacttgtggcgttaaccaactccaagtttatttccttatggttattaaaatgtgattaattaaaaagctgactttctttttaaccatacctgaaccgatacgtttcaatttgggattctttttactccctttctttctcaccttttcgacggccaattttttgaagaaaaaaaggtaacgtgataaaataacatattttattttagaataaattgtaataaagttactcgagaatacaaattatagcaatgtatagtagtcaaataaaaacatttcgtaacacattttactttttttcatcatgttggatttagaattaattctcatttatctactttatacagtgaaaaaaaagtttgtattcaactacaacgtttattttatacactatgaaaagttatgatattttagtattgtaaatttggatatgagtttctatagctctaatgaaaataatattttatatcaggtttcttattgtttctactgacaaatcaccaattattttgataattttttatttttaaatcaagacatttattttttattctttagaataagtaattttggttcttccatcaaattgataattaattaaccatctaaagtcaaacattggttttgatgtgtcatattggtgtttaggtaatgtttatgtaaataattgacataataattatgagataagaaattaaataaaatgaaaaataaaaaagattttgacagaaattaaacttataaccttttattttaaatataagatattaaatcattaaaatatttattttatttagtttaattttataaacactattcccatcattagttaagagatattaattttttgaattaaaacaatttaatatataaatatttttaattatattttaaatcattttatatattttaattttaattttaccaatttataactaaatttcataaattaacatataaattatttttcaaatttattttaatacaaattatttttactctaattatataaattgatataattacatcaattaatatgtaaatcatagaaatcacataaatttaatttaatatgtaaattatttttattttaattatataattagtaaaattttaatttttaattttttaggaaacttacatgttaatatttttattttaactatataaattatttagttaataattttttaataccaactatataaattaataaaattacataaattaataagtgaattatttataaaaattattttatataatttagaaaaattattagacttcatttttatatataaataatacaaattttattttaattataaaattaataaatttttaattatttaaatattattttaagtttacataaattttataaattacataaaataatttttttgaataatccatacattaatttgtgtaattgttttaaaattataattaataagaaatttttttatatatattataatttataatttatatgaaaataaattttattataaaaataaagacatatgaaattaaatgcataatgcatttaaatatttaaatattttattttaatttaaaaaattataattcaaaattagtagctctttattaattatacatgtaaaatttataaaattaattaaataaaacaaagtatttttaaatttcattgcttgatatttaaataagcaacaaaaaataaaaaaataaaaatcacagatttcaaatttcaaattataaagataccaaaattatatattaacctttattttattaaactcacattttaattaagacacccatgtttgaattttagttccttgcacgggcacggcatttggtttaaacttctttaattgagcttcgggttcaaaatatttctatattattttataatttatataaaataaatgctagttgacgtctatttaaagaattatcaatatatatatatatatatatatatatatatatatacacacgatcatgaatgttgatatatattaaaataattatacatttacaaatatatatcttatatagcttactttatttaaatgtgtgtatgcaataaatattagtttttgtcaatatagttatgcattcaaaatgtgtaatatatatatatatatatatatatatataaagtttttaaaagtaatttaaaagttcttatagcttttattaaacctttacggtcatcgctcgcatcaatgaatctctttcgatatcgtttgacaaatgactccataattaaccttaattatataacagcacaaaaatctacccattatttcccttgggtatacaaactaattaatttcataacaaacaaaaataaagaacttatctttctttacatactagttggtgtacttgggataatccttcttcatatgttaaccttttcactggtgcagcaaataaattcctcatcttactctttatatatatatatatatatatatatatatatatatatatatatatatatattacacatgtaactatatttattttttgaatgcataactatattgataaaaactaatatttcttgcatacacacatttaaataaagtaagctatataagatatatatatatatatatttgtaaatatataattatttgaatatatatcaacattcatgatcgatatcgtatgtatatatatatatatattgataattctttaaatagacgtcaactagcattttttatataaattataaaataatatagaaatatttagaacccaaatttatattttttttaatgagaacaatcttttaaaatatcctcaagtgtcttgtttctttttattttttgaatgatctagtttgattatagtgtcataaaaaagaacgatctaatttgatctaccattacaaaaaaaaaatgacatgatttgatatatatagcattattaaaaaataaagttctgtttgagttttttataattagaatgagttaatttgtctaattccatgtaactgagaatcaattaattcctttcaaacattataatttatacataacttcacaagtaaccttacataaccttacatacacagtagcataagaatgtacctattattgtccttggatatacaaactaattaatttcataacaaacaaaagtaaagagttgacccttcttcacacgctagttgcaacccttcatatgtcaaccttttacatgtgcacaaataaatttctcatcttgctcttttatattttattcgaacgaaaacaacctttcccaatatcctcagtgtcttgcttcttttattttttgaatgacctaatttggttcagaatgtcataagaaaaaatgacctaatttgatctagcattacaaatgatataatttgatatagcaccatgaaaaataaagttttgtttgagtttttttttttttttatagtttgaatgagtcaatttgtctaattccatgtaattgagaataacctcaactgattccttccaaacattataatttatatatgacttcacaagtaaccttacatacacaatagcacaagaatctacccattattgtccttgggtatacaaactaattaatttcataacaaacaaaagtaaagagttgattcttcttcacacactagttgttgtacttggggtaacccttcatatgtcaaccttttacatgtgcataaataaatttctcatcttgctcttttatattttattcgaacgaaaacaacctttcacaatatcctcagtgtcttgcttcttttatttttgaatgacctaatttgattcagaatgtcataagaaaaaatgacctaatttgatctagcattacaaatgatatgatttgatatagcaccatgaaaataaagtttttgtttgagtttttttatagtttgaatgagtcaatttgtctaatttcatgtaattgagaataacctcaactgattccttccaaacattataatttatacatgacttcacaagtaaccttacatacacggtagcacaagaatctatccgttattgtccttgggtatacaaactaattaatttcataacaaacaaaagtaaagagttgatccttcttcgcacactagttactgtacttggggcaacccttcatatgtcaaccttttacatgtgcacaaataaatttctcatcttgctcttttgtatttttttgaatgagaacaacctttcacaatatcttcaagtgtcttgcttcttttattttttgaatgaccttatttgattcagagtgtcataagaaaaaatgacctaatttgatctagtattacaaatgttatgatttgatatagcaccatgaaaaatgaaattctatttgagtttttcatagttagaatgagtcgatttgtctaatttcatacaattgagaacaatctcaattgattcctttcaaactataaaactatgacctccttattactctaatccctatgcccctctttccaatccctatgcatgtcttgtcgaacattggttataaattgaacactattattcacaaaaacgaaattgtttaacggaatgaaatataagaaattcatataattgtaacttttcaaatttataaaaaattgatgtctactgggagcaattgcacaaagattttggagataacaactcatatggcacatacatactgaaatattttataggtatcatgcacataggagcatgcataacttcctttttgttgaattaatgtagatatcttttgcattgatgaaccaaaacattaaaaataatgctgacttagaaagtgtattcatggaggaaccaaaaaattaaagcaacaagtgaaaaggcccatgtgacatcaattcaaatggtcacaatctgttcatacatcaaaacattcagatttacctttcctagaaccacacagcaatcactgatcaagtatcgggtaggagcattatctgttgcatctactattatatcatatctaccaaattcacataattacaaagaaaaaaaaaatagtcagtggtaatataaaaaatgaaatgtaaaatgtaagtatagaagaaagaggcctcaagcaaaaagaaaaatcaatcttattatagaaattatacttgctgagaatttccaaagcgttggaagtccgcaaagcttcttcatgttccacaacttgaatagtggagttgatcctaatattcaaaatatcttagttccaagaacaatgatgatacaaatattacaataacaaacatttgaaaaagaaaatttctcatgggattttatttgcagtttgtcaacaaaaattgatgtgatgaatggttggtgaaaaagtaacctacgagcgacaagcagcagcagcagatttcactttcggcttaccaacatatgcttccgtgtggataacctgaaataaagcaccaacttgtccaaattaataaaaatagtgaagttaattaaaaaaatagtaaacgaaacacaaacactgaagcaagacacatattaacacctttactcgcaaaagtgcaaatgcccaaaggctgatgccagacacaaacacaacaattcacaatgtacgtgttgtaccggctatgccaaaagagggtgggaaggtaaaacagataatacaatacctgcctatgcatattattcagctcaactacgtcatggtcaataacacccaagcgccctgagtatagtttttaaaatgtaagtttcaagaagcatatagactgaggtattattacatattccttttgtcaagaaacatatataacatatatacctagacacaacaactaattaggatacctcatagctcttatcgtccatagtttccaatgccgcatcttctttcgttgatctattgacaccagtatcattcttcgtaagaagatctgagctggtctataaattaacacaacaagaacataattaggtgcccatatatataattaaggtaaaattacaattattaaatctaaggaaatatttaaatgtgagtttggctacatatatagtacatacatcaacatgaaggtcctctacactttgatgatcatcatcaatatcatcatcttcactctcctttctcttctgagcaaaatcaagctcatccatgacaagtggtgtccttctaaacgacatgactggatcagaagaaaaattttacaggtattattacatattccttttgtcactcttggctttcttttgcttttttgtttttttatctttcttgtctttttatattttttatgaatgaatagccccataaatactgactaatattttgtttcttgaataccttgtttgtttcaaatccccattttatgtatagtcttgaaaatttggttgtactttgacgcattttggtttgtttaaaaaacaattttcaaaacttaatagattttagatgatatatacattgttgagtagtgtaatttttttattataaaaagagagaattaaacatgctcctaatttatttatttttagtttttttttttctcaatgaagaggtgcttctttgacctttgttgcccaccactcactaggatttttttttcttccaggaaatagtttcagcatacccttttatttcacctccaggcctgactcaagcacactcaaatcgagtgtcaaagctcttgttcttcttcaggtccgctcacatatactttgtctggtctttttctccttttcttcaatgctttcttactaacacatatcttttgctctcatggatatcttacagtgtggcatctcaccccgatataaggatggattcctccatggtaatgatatttttcttattcacctgaaggaccgtgaacttctgtttggtaaataatattatttatgataaatagtatctttgaaaatttggtcttcaactgagtcaaacggcattgcatgattcatgtatttttgtggttgatgttgttcccaaactttgcttttgtacggtatatgttcaatacatataaaatgattgttgatatcttatcatctcctagatatatttttcctttttttctcactaataaattttcttttgcatttatttaaaattgttataagatattgtaaaagcaaccaattgcaaccaatttaaaaataagaaataatttgttaaactataaaatttcataaaagatgattaaaattgttataagttttcttttgcatttatttctctcctatttcttttaccattcttttttttatcttattttcttttatttttattttattttctctttttcttctccttctccttcctctttttttctttttaactttcttgtatttatcattaagttcatctattatcaacttccaattaatttggattaaatgtaatggtcaaaagaccatacatacataatctaaaatgttttctgcctataaaacagaatcatgcagtcaatttttatgtgcaacttgctctctctctatcttatcataagacttctactttatcttacttgaaaatgaagtttctctctctttcaatttataggtcataccacttgttcttctttcttagcattcagtcatacttatattttttttactgccaatatactttcataagcatccatggacagaaacttttgggcaattgaaaggcatattagttgttcttttgttaatataaaattaaggagattgctttgacattaccatatccgtttcagcagggtttttgctcattgaaactaacactttaaggaaaaagatatgactctgttcactctttacacttacctttttctcatctgcagctcgtatacctctatatatgtatcccttgcttaatacaaccagtatggccaatccatttgagaatatgaggcttaccagtcttggagtcattggtgccttagtgaaggtactacgtccttgctgattctgttattgaatacactagactatgagaagaataattttttatacaacatttatgctgaacagagaataatttcaattagtaaattattgtcacaataaaccctgccataaaaaactaaatactacaataacctcaagtaatatgtcatttaaaaaacagtaataactgattattgattattataaatctgtggcacacaggtaaatgtgtaaatattttagttgccacaaataattagtcttgttataatcttataatgttcatgtagattttcaactatttgttaagtttcaaattcattcctgtaataattttctatgatgtaacaggtacatacaactcaacttgttcggattagttcatcgctagtatcagggaacaaaattttccgaactattttatgcccttcaagatattgttgattttttttcctagtgggatgaagctattgtttttttttttttctgttgcttgtcacatgtacatttatacttgagttttgtcatgtgtttaatttcctttctgttgatatttcaccagtttcataatacagcagctataagtttccttctttcaacagtttcttccgctttgcctgcatagtatgcaaataggcggtgaattgtcaaaaactgtaagtttactgatcttgttttaaaccaatttggttcgataaaatatttatttggatgaattaaacttgatttttatttgtttcatttttctgagttacattttttgggtatgtatgatgaacatgtatgcatgtgaagcatgttccaatacaatgctacataggaggtgtaaggcaattagcataccatttatctgatcaatgagattacaactgaggaaagtggtcttggcataagataaatggatactatgtgaacttggggagggatatcatttaagaactctctttttttcatcttttgaactgttggtcttaatataagtttttttagtggttatcacaggactgttgaaactcttcttgacatatttggttgtagaagagtgctagcaatactccttttaacattctattattggttgaaatttgttgaaaatcacaaattttggtaagttccacttttaaattaggacagagactcatcaaaccagaagtaaaaaccactattataattttcaataaatttaaactaataaaaaaaagaattttaagagattttaagagagtgttgcaaacattcctgttggttgtatcaaaatgcaactcgacaccagtatttgtagttacatgggttgaaataccccgtccttgatacttgagatctaaatctttaaataacacgtttgtttaactcttgcgttgtagttggtggtgcatcgtaaatgttaagccacgtgtttgtttttgccactatctcgtgatcctctttttatgctatcaaaataattgtaatgggaaaatttgtgtgtaatctaatggaagttccaccaactgcaggttggaacctttatagttgaacaaattctgtcggttgaaaatggtatgaaacatatttgtacttcagcagggcgcctttttcaagtatatatagttttcggaacgatggtggtaactcttgttcagcaaccttcatgtcgtcttttgaaggtcattattcgttgttatcttcgtctgtcagaaaatcagaggtttgttaagtagatagtaactccagttttataagtgcttctgcagttctgccaatgccctttacgttcttcccaagtttctaataaaactttggtcatttcaaaatagagcttgtcatgcattaagaacctgtcttccagccgtgttaagagaagctacattcagtagttgccttcgtgtaagtgatattattagtataaaaatttgatttaatcaataagattgaagtgagttgattaagtgaattgaagattaacaatagggcattaacttgtaaagctcgctctcttcaaatttccgagctaaagatttttctcctcttcttatgaagagattattcatggttttaggatgtttacatttttttatgattttggttttatttattcaggaacacccaacagctaggagatggctacagtagttgcttcataatattagagtcaatccggttcttgcacaacaaggtggaggaggatccgatcatatgacggggtcgtgagaacaagactttctggggtttctacatacataaaataggattttcagttgggcatgtatagagagaatgaagaattgaatgggaagggaactatctttccgtttgatgtagtgaaatatacatgagctgatgagcatagtcacctcttaattaaatgcaaatattaaaatcataatgagccatatatttcaaaaataaaaaacttctcttcatctatatggataaaggagattgttagagattaaatataatgagagtaaaataattattcatttttttcttttaaataatagcatgtaaattttgttccatgctattataatatatgcaaccaatagactggaaattttattccattatattccactttatctcattctatttcttttcatcaatccaaacaagtccaaaactcaccaagataagagtaaggaaccaatttgatcattcagttgaccaatagaagaatctcaatcaaaacccattgaaacctcgttgatcaaatcagacctaaacacacaatataaaacatccaagaacatacacacagccaatcatgaactaaaaatgagaaaatagattgaggttttaggatcttaggtaccaatgagtggtccagattcactctccatctaaacataaatttgagcttctagattttaaataattaaagaataggaaaaagtcaacccttcacaaattgacagatgtcgcaagaaggttcaaaattgatttcatatgaatctgaaaaaattgtccaagaagaaaaaaaaaaaccttgatttcatatgccaagctgcactatggtctaaacaataagccaattacaacataagatggaagacaccaatttattattattagtaacaaatttaagtataatcaaatttatatatgtatatgaaattttagatagtgtcaaattttaagtaatattaaattttattttaaggtagtgtcaaattttatttttaatcataattaattatataagtatatataattattgataaaaatcccccactaaataactccaattttatttcaaattttatcttatatattgtgtcatgttgcgacaatatagctccgccacttatagttaaatttcaacaccattctctcctacagatatttaccatgctgtaagccccaaatcatcgaggaagcagcagagttttgtgcatccttcaccctagattcttcaaatgttagggatgaaaaatctagggtgaaggatgcacaaaactttgcaagatccttttgagaaaaagaggaggcaacaaacaccttagcaacacttgcatgtccttcccttaattgttttatatcaacctgcttcgccttcttttggcacatctcatacaacatagtcactattggctccaaaacacccctcacaatcacaattattttcacaaaccaatttttcatcatcttgaatttatacaacaacttcaatgtaaaagtaaaagcttattataaaaatcatttataatagttgtcattcattttcatcataatgaattgattcagcattgcaaatgaaattaaaaaccttgcctgataatcaattataatacttatcattcttatcctatttttgatacaatattaaaaaatattatatactatatttgaatgcaatcttaaaaaatattttatcttattatgtaatgtaattttaaagatttctattatattatgtaatgcaatttctaaaatattttatcctatttttaatgtaatattaaaaaatattatatcctattatattatgtaatataatcttttttattattaaattacttttttaatttttaatatatataataaaatttatattaataaaatttgggggtggcccatcctaacctccctatctcctcccctttccgcaagtcactctcaccctgtctcacttcattccaagtccggtccttcccgattttcttttataaccaagtcaaattccttttagaagtgcgtgtttggataggtaggtcagtagacggtcacaacatcttgctctcattgagtaggtgggtcacgacatcttggttgctctcattgagtaagtgggtcacgacatcttgctctcattgagtaggtgggacacgacatcttcttgctctcattgtatataactactcaagacatctttttgtagcaaaggcattaaaataaaaaataatagaacaatctaaagaaaaaaaatgataaaataatcaaggataacaagactaaaaattatcaataatatttttagaaagaatatttgtttgtcttaatcataactttttgaagcacaagcagggaaataaagccaagaacaaaccagagccagaagcaaaagcctaatatatatgttatatatatatatatatgtgtgtgtgtgtgtatgcgggtatctatgcatgaacattacagcacgcgtcgaatatattgcctcaataatgtgttcttttttttttttggatacaataataatatgattgaattttttaattgaaaaaatgaagtagacattcacttgtgcttgtgggatagtaatttattttccttttaggttgtttcattattatatcgaacaaagaagacgagttaagaatatatatatatatatatataaagaccacttaatatatgtccttattaatatctttttatttatattaaaattacttcttaatttatttatgttttttatctgttatttttattaattttttcactcttttataagaaatgatacttttaattagtcttccaaatattttataaataataaatttatttaatatttaaaaatagaaaaaatatttaataaaaaaaactagaaaatcagtatgaagatgttacatgaaattataattaatttaaaaaaatgtgttttgctatctccttgtttaagaaattatatcatttcttcgtaataagtttttgtgcgtgtatcatattaaagttcgaacctagttacggctatgaccttatgtgtattatccaaatctgtcaccactagtctttgtaacaagtgtatcacatgatcttttgaaagaaattatttctttcttttgataaacttacaataagaaaatatgtaatttaaatatttagaacaaattcatatgtttagaatagatctaaaatgaaatagatgtatttagaaattagttgttttaaaagaattctccttaaatatacaatacacatcacattctatttttattttaaaattgaatcaattttgtaagtttaaaaaatacagggatttctcaatgggtaatgttatttcaatacctaaccaaagaacaactacattaccaatagaaaagatagtcgtcattactatagtggaattttggaatttattaacattatctaaaaaggatatcgttaataatcttataggtatggaaactattaaaagaacaccttattgagcactctacaaagcatttgaagtatgagaaagaaatattgttcagataatatttctaaggagttgcaaatggatcaatgagttccccaatcatggatggttctaaaacggctaagttcatgacaatactatctatagttattaaatataaaagattgttggaccatgcatgttctccgtaatgattatgactcatttccttagtcaatttagctcttaatataagatcattcaaaatatactttttattcgtgaaaattgataagtataaaaaaatttacgataactcaaagactctatttaatcaaatgaactaaacccctttacataaatcaataaaacatttgaaagatttgttttatcatttgtcctaacaaatgtaaattatcagcaaatatctaaatgatcattgttaaaagataaataaagataatttattaaaaattaaaatcatcatgtgactattaattaatttttaatcttaattatttaacattatatgactcaaatttatatattttattcttaaatgtttacactaaatatttccccttcaacctttttcatttcataacatattttttatatcattttttattattttttaatttccttttatatatccgtatcaatatttattttttcaattaacctcaactgattccttccaaacattataatttatacatgacttcacaagtaaccttacatacacggtagcacaagaatctacccgttattgtccttgggtatacaaactaattaattttataacaaacaaaagtaaagtgttgatccttcttcacacactgttgctctacttggggcaacccttatatgtcaaccttttacatgtgcacaaataaatttctcatcttgctcttttgtatttttttaatgagaacaaccttttacaatatcctcaagtgtcttgcttcttttattttttgaatgaccttatttgattcagagtgtcataagaaaaaatgacctaatttgatttagtattacaaatgttatgatttgatatagcaccatgaaaaatgaagttctatttgagtttttcataattagaatgagtcgatttgtctaatttcatataattgagaacaatctcaattgattcctttcaaactataaaattatgacctccttattactctaatccctatgcccctctttccaatccctatgcatgtcttgtcaaacattggttataaattgaacactctattattcacaaaaaaaattagtcccaataattatcacacaattactattacattgcatgaaattatttgattaaatttaatttatcaatgaacagagtataatttgtatgaataataattttaagttaaatctatataaatttgatcaaattcacgtgcattacaaagtttactttgatattacatattttttcaattattccaaaaaaaacactaaataatttaattaaaccaggaggtcttaatacacaagtttatcgtttatgtgcaaacccataaaaattatgtgtatatcatcacttaacttacatgaccgcctaacagtccttggatgagagaaatatttcggaaactgtttttaacttcaaccctcaaatctttccgtacataaaggttgattaaaaaaataaaacttcaatcgtatgtactaatgaaccgcataatcaagaaaacaaataacgttgtcaacaatcacaaatctgtcatattctaattcgtaaatactttgatgtgccgtatattagccccaataaaaaaacgttaaacgtgtactgcatgttttgaaaattatcgacgattgtgcgatcaaccattgtcatttgtctgaatcataaatcccagaaaacaactttcatttctcaacgatccctaatagtaatatataaatttctcgctacgccatttgcaacgatgaccatcatttacctttcatagacaaattaataatatacgtactaccatttaatctttagatagtgaattccaatcaggcctaaagccttcactgttccttattatatatatatatatatatatatatatatatatatatatatatatattagccggccaatactccatagctatggtgaatactatgaatataaatgtaataaaggtattaatacataaataagatgaagaagacggttacggaagaaaaatatcaagagaaaattgtgggtttcatttatttatttattgaaaatattagtgtttttttattttagaggttgaaattatttgtttttattttattaattgtaagtttataattggttgtgtgtaaggatatgagatgtaattgggtttgtgtccaagaatacatgaggtgaatatgatcaatttaacagtaaaaaaccctaccttttataatttaaccttaacaaaaataaacgcaataactatattttctccattactaattataagatgatttcaactaaattatattcattagaaaaagtagttaatcataataaatgtgtcaattatacttttattatcattttaaaatgatttttttcttatttttctatctacttaattatttcttattaatgtttggaaagagaataattaaatgaaaagtatgtaaagaaaaaataataaatatatcttgaaattagaaaaggatcttatgaaaatggacaaacaaatttttaaaaagtagcttataattaaagatgaaaggagtaattttaagaatattgaataaagtgataagaaaaaagaatcttggataaacaattaacctctttggttgttatttaatttattttcggttttatatatttaatatctattggtgcttatagaaattagggtgaagggttgcatgagcttagtctcggtatgcaaattgaaaagtactggagatgttggattaatacatgagaaaaaaaaaatcttttaataaataacttaaaaaatatttactatataacatgaatagctccttaaaacaaatatttcgataagttcaatattttaaaatactccatacattaacattctccgagtaattatctgaattatcaaatagaattgtattaagtattcaatttatttattcatataataatttaaaagaaaattaaaatcatgggatgatatatcactgctatctgaattaacattgagctcggtgtcatacataaaccagtgaaagatatttatttattgtaaaccgaaaaagaaaaacacaatatattggacgcaatgacgcatgcaggccatgtttggcattatttagttatttatggatcccaaggtaagggaagttgtatacttgtatgcatacgtcttcaatgttgacgttcacagcagacgagaagtagcagtgtaatctgaaaaacatggcttaatagtattagtcgtctcaataataataaaaaacaagaaattaggttgcatactgcaaagctttgaaaataagcagagaatattgttgtttatgatctgggtatatattataagaagtaaaaaaattataatatcatccgattaacataaattgtcgaaaatgattaaattattaatattataataattactttagaaattaaatatgtttatgggggagtacttaatttctttttgttgagcccgttaaaatttagatttaaatgcatttttatctcaaatatcataattgtgtgatttgatttctcaatttggacatgatatttgataatatgatgatgtgatgtgtgaaaatataaaaaaaaaactgacaaaatgaaaaggataaagattataactctcaatcaaaattccaaaaaaaataatacttaccacaataaattaatagattttttcatatataaatgaaagttatataaatacaaatataccttcaataaaaatcaaaattgcacatatattacttatatatatatatatatatatataatttctagtattaacaataatatctttgattaatcttcttttgacatattcatatttgcatgcaatatatttctatttattaaattattaataaatttctaatacaatactaataataatagtattaattaatatatatatctgtattattattattattattattaatatatttagtatatataacctttctgtttagtaataataaatacatgtgcaaatttgatttcatttaaagtaactctcatctatatattagaaaattttattactttagtagtttggtattacgtactattggagcttagggttgaggataattctaagctcatcttggatattttgaaaaaaatgatcctcttatttttacatgtcatgttacaaattacgaacatataattaagcatttataacatcagcctcatatcaatttcaggcgttgtacatcatcggtatagttaaggatcaaaaatcgcaagaagtgcatatatactaataaagcctaaaaagttgtatgtatatttaaggtaaaatgtgttacgtgcatgaagtcaaatagctaggagagggtacgtgacatacatgcataagaattaaaggtgttgttagaagaatggttaaaaaattgaaaggaaaaatatttattaaaaagttcataaaagagcataaaaaatcataaaaatattttatacatttcaataaaaatatatttcttaaattcttgaactaatacagtaaagatattagtatttttgaagaattaattaagaaaagagggaaagatatatatacatacttccgcagcgggttccgggaggaactgattttccacaagacctgaggacatagacaattttttctccgctgaagtatgactgaaaattgccggcaatttggcacatgcaagggacatcaacatctttcagggtgttgcagcaggctgcagatggcggaatcattggcccttggggttcatagtacttctggcattcccgttgaatactaaaaaaaattaccattgcaagcttgacccgatatacgtggcacacctacaatgccagcaaccaccaacattatcgaaaaccctaatctaattccctgcatcctcacactcacactaaccacttcaatggaggattaattatatatgcttgcaattgtggagttgggatcacacactcatatatatagaagaaacagaagggagttattaaattctgattaattcaatatttgactttcttttaacccaaagctgaaaggatacgtttccttaccttttcctcggctaatctcatgaggaaaaaattaaaggtaattttaattaacgtgatattaaaaatctaatgggaaaaagagtatcatacgtctggtgtgggtctgtggttatatgtgtgtgtgtgtgtgagtgtgtaaaatgatcattacattacaaaaagaaaaactatatcgtaaatataaaatttatcgaatggaccaactaatcaaaaatcaatatttatatgatatttaaaataatattataaaattaataaatttataataatttatgtttaaataatactacctctagctaattcttattataaagtctaaattaaatcatttttaaaagatccaatctaatatgttacttgcattaattgtttttcacaaaatattcttaattaaaatcaatgcttgaatgatgtaaaagtgagaaaaaaaaaaatatatatatatatatatatatataaaactgattaatgtttgtaagtttttatcactagagaagttacaaaataatttaagagaaatttaacactctcaattaaattaactattttatataataattttttaactcgtatataagttaaaataattaattttatattaattaaaaaaatagtttacatcataaaaagagtcatcaaaaataaaattaaaattaaataaagaatgttttagaataataatattaaatataataaaattcattaaatttacttatatttaagtctattatataagataattttttgtttataaatgagtccatagtaagtactaattttattcttatttatatgattcaattatttaattcaccagaattaagaaaatatttaaattaatgatgtttatatttggattccttacacgtaggggcacggcattggtttaaattaattaattgagctcgggtccaattatttattcattaattttttctacctttttcacgtgcggtaaagtttgccatacgttttaactagttcaataattaaattactagttggtctttggactatttagaaatttttaagtaaatctctattattattctattttgttgatttattatttttcatcttaaaaaaggagctaagttaagaagaaacatgattatatatatatatatatatatatatatattattctattttgttgatttagtatattattattagtattattattattattattattattattattattataatagtagtaaattaaatgtttaatgttaattgcctcattgatttttatttttttttataatttagatgaatgtgctctgttcgtcgtatcgtaccatcgtgttgatgaaagcacagactattttgcatatgcctaatgttagggtgcccatctataactagagtatgattttcagtagattattaaaagcatttcctactcaataacccaatttttttaatggacctattgccatataagatttaattaaaataattcaccaattttgactccaatgttatcattcaacttaaattcttaattatttagaacaagcctctaattaaccacacatcattattttctgttaagctccttatagttcatagttgcaagaacacacaaatggcagcgtatcaaataagaatagttctcattttaagaatttgaaaagtataaatatatattactcaaccaaatataaatggccaaaattataattcaatttgtggtcacaaaaccacttaaaaaatcatgtgcagtttttttaatcttcaccacttaaatatatatatatatatatatatatatcaatatttggaatttttattttcataatatgaagtgttctcatctgatacatcctctctctttctatacataaaaggattaacggattttctctatttttttctctacatctataaatatatatacacaaatatacaagtttttaagaaaatatatgttagtctttataatgggtgaattatctttcatttatttatttaccaaaaaacttatgaaatggaggaaaagaaaacaagagagtcctaactaataaaaatacatatctagtgaaagaacttttatgaaaacatatcaagatatataaaaatggatcacaaatcacaattacacatgactattttagaaggtcacatgacttttttttatctatattttcatttcgattcatattaaaaagtgtttgtgagagtattttaaaaaacttataaaaatatcttccaattggtctaaaatatttcttaactttttttcataaacttttaaaataatttactagagtagcataggagcagcttattggaaggcacacctatgaatcatgttagacacatttatagaggcataaatgtattttttttatacatattatccttttttacatatttatttttcatgttaagcatcgatctttaaatgctgattttttttttgtttttatttgatttttcatatacttatattatttatttatacaagtgaattgtaaatttttaagctgattgatcatgattttactatatatacgattttaatttaacgtcttaatttatattttaatcatgttatgattattaaatatttgaattgttttaaaactactgataagtatatgattttttttaacacttatagcaaaaaataaaaacagactaatagcattcgcattgtaatcttgatgtggtttttctctttgttaaggatatcctctgacaaagcaaagacatagttatttaattacttgcttagttgatttcttaatttatattattttattcagtttttatgtccaccttatgtatattaaatttttttaaagaggtattataaatttattgattactatagattttgagtataggtaattaagatgataacattagtgttattgcatgattccataatcttatcattcaaagaattataacaaaatataattatatcttgtaagtaattggtaaagttatgatgatagcttgttaccaaaaaaatataaaacaaaatgaatcaggccatgagccatgtcaggtaaataaatgtaaaacccagaaaagaaaacccaacaaactgtgacttattttaaataaaacattataatactccaaaaatattttttaaataattcaaataattttagtacattatcaatcaattaaatgattttgaatataattttgaaatggttacgacaaaaatcagcaattttatcatacacaattatttatgaattatgattaaatactattaagaaaattgtttcactcagtttttcttttgtaagtaaaaaagttaaactaaaaaactataggaaaacacattaaatatttgcattataaaataataaatacgaatgccttgagatatttaattttatctgtagctttaaagtataatattatgaatatatgaatataatttaatgattagaaaatatttcgccttagttcaaggattagaatatatgcattcaaaaaaataatttaagaatgtttccttgaaattgaatattataaatatagtaaaatgtaacaaaatattccttatttaaggatcttgttaatgaataaagtaagaatattttcctgaatattatattttaagtaaaaagataaactcaaaaactcaaatatattttcttttttttgaatagtcaaacatctatctaaatgttattttcattgcttacatgataacataataaaaatttggattctaagtaataaatgctttgatattttatttatatgtttaaaatataatattataaaaaggataaatatatcggtgtaattttaaaagagtaaaatattttttaaaaaaaaaaacagatagatattttaatgatttaagccaaatcaaaagattttattattaagtatttgatttgccacaacttttttaaaaattactatatttttttttgaataatcaatttatatatatatatatatataatataaagcgtaagatcattttctattaacaatttgaatttcgtgtaacatttttagagttaaatcatcctcattttgatcccagcaatcttataaaaatcttagtaatttaatgataataatatatataatataacgcattaagtgtggaatattagcagcaagactataaaagaagacaacaccttggcaaccaagtgcctttcgattaaaactccctaccacagaatgaattctttagcactgtgttccctgttgctctccctttgcttgtttctcattgctcagtctccttccctaacaaatgctagagtgattggtgatggttccgacctaattgcccaaatttgcaatgaaaacccacagaacaaggattgaatgcacgaatattctaagagcagatcctaaagtcctgggtgcaaaaaattttcttgaacttgcagaggcaatcttggagttgggattgaagaagggaatagagggtgaaaactttcttaagggattggaacatgttcccgccattgtaagatgtgaaaattactatgaaagtacggttgaatcgtttaggaattctttgattaagttgaaagacgatcctctaattgctaactatttggccaaaattgctggtgatggacctttgtcatgtgaggaatccttgggtgctgcacatattgttaaccgtgcaatttctactcttgaccaccaaacaaatttgcttagctatattgcatttctagccacagagagacttagttaggcagcaccttcaatctaaggtctcttagtggtttagcatgttctttgttggagagtaattaataaaaatcaaattcaagttttctgctatttgtttgtggggtacgtacgtgtctagctaccaccattatcttttcttgtctatgtacaacattttgtttattgagatatataggtttagtagtgttttttataatttccaattttatctggttaataaaaaataaacataaaaaatgaaataaaagaagttaaaaagaggaatatgtcattgaatttaaacctattaatggtgattagtcgagttttccaagatggtcatcaataatatacaccataccaatgattaaaaaaatgattagtcacgtgtttttttgtcttatttgcctttgatcaattttttgtaacgctgcactaccgaagaacaccatgagcaaacaccatctcacaacttccatgcatgttgactcattctttttctctatttaattggttcttttgatacccaatgctttatcacttgtctatttatctgttgttttgctatatagctttgtttgtggtggattgattataaccctttttccctgttggaatgatgcaattgatataaatttattatcaattaaatatatgttatgcaattagcataaaaaataggctataagttgacagtttaaaatacttttatgaactttatgagctatattgatcttatttactgttggtcccagatgaactcaagagggggggtgaattgagttttataaaataattcacaatttaaaatcaaattcaaaacaataatatggagataaaagataaagagaacacaatcaattttaacgtggaaaacccaattgggtaaaaaccacgatgtccaaattggataaccaatccaatagacaactccactatgataattttgtgtacaagagttcctagtatcctagtttcctagtctacccttacacaacaattatcccagctggtatccttgtttcccagcaaaaagctctcgtctcaattcaccaagaatagagacagactggtatccttgtttcccagccagactggtatcctagtttcccagccaaaagtcgcacgtctcaattcaccaagaacagagacagaactggtatcctagtttcccagttgcgacctcttccaaacttaagaagaagaatacaataaaatagttacctttacgcttctattccttaagcaaataggtacctttaaatcctgatggagagttgaagaatcagtcttgccaaacacttctatatgatctcacaacaactctctcaatgatgcaaacataaactctctacagctctaatattatttggaatggaatgcatgctgtaaacacaagagtatgcttctatttatactaatttaaagatatgattttatccaatgaaatcctaaaagatattctattttaaaaatattttatcttatcatgcaatgcaatcttaaaaatattctatcctatttttgaatgcaatcttaaagataaatatattggcaagatcaatcttctaatctccttacataatatctaaaaaataaatagaaacaaatcttctttatgtcatcttgaatgatatcaatcttcagaattcttcaaataatcttatcttcaaataatcttatcaattatgctgatcttcataaattcaaaatatcaataacttcaaaatatcaaatccaaaatatcagtaacttcaaaatatcaaataattattatcactgcaattaatctaataatgtggcattcattatttgttatcatcaaaactttataaatctttttatgcataaagggttcaacaaatatccaacaatttccccctttttgatgatgacaaataattaatgtcatgtacaaattaaatgaacagatatactatgaatgcactatgaatgaatgatattcaactttatctactaatgattttcaactattccctagccttgctaagttatgactagaatcaataactcacaacatgacatttaaacctctttcccccttttggcatcatcgaaaagattaaaacaaacaatcatgatagagagaatggttaagaaccttagcaggaacagggatacatggaaagagcaacatgaatagagctatcaatgaagaacaagaaagtgataaagatgaaaggctgcaaagaaattaacattctaaagcacatgccttaacattgcaacaaattgctttttcgctcatatttaggatcactctatgttcttattctccaggctttctataagcttgtacatcatgactgctctccactcttagtgtagaaatatttcataagccaccaaatcaataggtctttataagcttgtaatgtataaggtggataagaaacaaacaaagaataaggtgagataggaaacaaataagtatagtattgatatgcatagtttcctactttcctctcaacttaatactttcaacatttttaaaataaaaaaaatcaagatgactacttcaacttttttttttatagtcaagatgaattttattttctttttctttcaactgtcattcctcctttttctttttctttttcaaccagacacctcatgaaacttgctttagaagatggattttattttctttttctttccactatcattccccctttttctttttctttttcaaccagacacctcatgacacttgcttgagaagatgatgattttttttttttcactgtcattccccctttttcttcttccttttttttttttttttttttttttaaaccagacacctcatgacacttgctttagaaactatgcatacctacacttaaaaggattttttttttttttttttaaacacaaagggttgcatattgtaaattatcaataaaaatcagagttaaggctcaaatggggtgactagggatataaaatactgaaagagttagcttgaaaggctcaaacgaccaaagatggcctatatcatttttagtaaacttatgaaatatctcaaacaatgagccttgagcttcaatcatacaagttctagattgcctgcctcacagagaaaacacacatgcacattattcctcacaacatagcaaattcactacaatatcaagacatgcacttcagagttaataacataagaaggtatatgaagtgaacgatgtagcaaagataggtgaatatggaggtgagaaaacaaacaagatagttcaacaaatatcatgaatgcccgttcttttctaaactagtcaatcattggggaaaagaaattttaacatattagttgtgatttatcagtcctagctccagtcttaatttttcaaatctctaacggcttaggggtttagtgaaaatatcagcaacctgatgtttagtatcacataacctaagttcagtttcttgatgatattcaagttagcatgtcctaacctcttatgccacaataatgggtcattatctaaaacactcaaacaggtgagagaaacatttgacaaacaattcaaatcaacctgataagtttttctaattcttttaccctctagaattacctcatttgaatccattctagttactaagcatttatcagaagtaaactcaacttggctacctttatcacaaaattgagaaatgcttaataaatcatgattaagacctttaacataaaacacattatctatggagtgtgatgatgacttaccaaccttacctacgcccataatcttccctttgttattgtcaccaaaggtcacacttccaccttcaaaaggtttgagtgagagaaattttgatttgtctcctgtcatgtgcttggaacaaccgctgtcgaggtaccacaagttgttccccctcactccaacctacagtctcaaatcaatgattagttttgggaacccagtctagcttgggtcccttcttcttctcaacaaagttagaaagcccatcttttctaacccaaacttgttttactttgcatgcagaaatagagttattcttaacatatgtgacattcttttcaatagcttttatcctattcttgcatttgaatttaagatgtcctaccttgccacaatgataacacactcttttctcatacaagttcacatgcttagtttttgttttccaagtagatttcttattacctttaaagcctaacccatgcctagatgtgttacaattcttattcaaccagtcaatagcattgggtctatctaccttgggagtcctaaggacagactctagcttattttggaggtccttattctctttagtcaacttttctatctcactctccaacttttcaattttttcttccaatagagcatcacaaattttcacacattcctctttcttatgctctttcaatttaacaaccaaagaattattttcgttttcaagttcagaagcaatattcttaaggctagtgatttcctcctctagactcttatttgtttttctcaattctttattagccttagagaatttcttaagctcattctttaattcaccaaagtcatcaatcaactcatcattatgttcacgtatttttaaatactcatctattacaaagtctaacattttcaatagatgcttctttgttaacaaatgcatggaagatctcagctcaagaaaatttacctcagtgtcttcaccttctgagtcagttccagccataagacaaatgttgtccttggcttcactgttttcagagccttcttcctctgaatcagaatcactccaagcagctatcattgctttcttgaactctttcttatcatacttcttttgctctttggccttcttctcctttctactttcttgctctacttcaggacaatccttaatcatatgacctgttttgccacacttttggttctttaagtgttttttgaactttcgcacaagcacttcaatctcctcctcatcatctgagtcatcactcacttcctttgattgagcttttaaagcaatgcctttatccttcaatcttacatcttcgtttctgtggcactctagttgcatctcatatgtcattagagatcctaccaactgctcaaggttgaaagtcttaaagtctttggtttcttgcaaagcagtgacctttggcatccagtcctctctagggagactccttagaattttccttacttgctcctcaacctgtatgtccctgcctaaagcatttaactcatttactatgttagtaaaacgagttatcatatccctaatagactctttaggcttcatagagaacaattcatattgatgcataagaagatcaattttagactgttttacctcgtttgtaccctcatgtgttacctctagaagattccacatttgcttggcagttttgcaacccatcacacggttgtattcttgtgtccctagtccacaatgaagaattctcttggcttgagcattgtattccaacttcttccaatcttcatcagtatattcgtcctcaagttttgacactctttctctcttttcattcatctttgtgatatgaaagtctcctttttcaattaccttccagacttgatagttctctgcttgaatgaaaatctccattctattcttccagtaattgtagtattttccctcgaatagtggaggcctttgggtagagtatccttctcttattgtttctattgggttcatcttaagatctactcttcaggagttacctgcaaaataaagagaacactgctctgataccaattgttggtcccagatgaactcaagaggggggtgaattgagttttataaaataattcacaatttaaaatcaaattcaaaacaataatatggagataaaagataaagagaacacaatcaattttaacgtggaaaacccaattgggtaaaaaccacgatgtccaaattggataaccaatccaatagacaactccactatgataattttgtgtacaagagttcctagtatcctagtttcctagtctacccttacacaacaattatcccagctggtatccttgtttcccagcaaaaagctctcgtctcaattcaccaagaatagagacagactggtatccttgtttcccagccagactggtatcctagtttcccagccaaaagtcgcacgtctcaattcaccaagaacagagacagaactggtatcctagtttcctagttgcgacctcttccaaacttaagaagaagaatacaataaaatagttacctttacgcttctattccttaagcaaataggtacctttaaatcctgatggagagttgaagaatcagtcttgccaaacacttctatatgatctcacaacaactctctcaatgatgcaaacataaactctctacagctctaatattatttggaatggaatgcatgctgtaaacacaagagtatgcttctatttatactaatttaaagatatgattttatccaatgaaatcctaaaagatattctattttaaaaatattttatcttatcatgcaatgcaatcttaaaaatattctatcctatttttgaatgcaatcttaaagataaatatattggcaagatcaatcttctaatctccttacataatatctaaaaaataaatagaaacaaatcttctttatgtcatcttgaatgatatcaatcttcagaattcttcaaataatcttatcttcaaataatcttatcaattatgctgatcttcataaattcaaaatatcaataacttcaaaatatcaaatccaaaatatcagtaacttcaaaatatcaaataattattatcactgcaattaatctaataatgtggcattcattatttgttatcatcaaaactttataaatctttttatgcataaagggttcaacaaatatccaacatttacctcaattactatcatacagtggtcaaaccctactcaaccacggccaataagtcacttgcttttcagaagcagtgctttgcatcagtccccaaatcagctaccaccaaattggcttgtatatgatcatatagtattccctaaatattatacttagcaaatcagctcatataacaaaatgcattataaaccgagtgaaataaataccaaatattaactctaattgtctacacacttgataccttttgaatcgtatgaactcaattggcattcttcactaaaattcccaaaccaactcagagatgaaccacagataatggtaagcaatctcgaaggcgtcgggttcccattaggaatattaaatactcttaaactctagcatcagccaatctcaaacagagcctaaactcttcgtctgaagtgttatgggtaaatctttagctacaactccaaccactttttttattatgaattgtcctacttttactttctgttgcatcgtaaagaattaaaaatgttcaatctatggaaggtatctaacaactaaagacatatcatttaaacaaataaataaatttaacataagaatagagtaggacaacagaatagctgaacattaacttttatttatatcttagttgagcatacagagcttattgatgagagatcacccaactaagcttagccttacagaaaatctctaagttaggaaacatatatttctaggaaatggttggtaaattgtcgatccaactatccttattaacgtaagaagctaaagaaaattctttgagttgtaacttatttaatttcttcatccacttaacacgctttgaagtatcagcccctggtcctttgcaatcaacttcagcataagtgaagttactcctacaagaatttgtttaaaaaataagacaaaatgacaaatatggttcaaaaaaattatgaatattacttttaatgtatcctttaagagataatatatttatttaaacttactcatggccagtataattccaagcgttccatccttgaggagttaccagagaggaaaaatatgttccatgaaatatgactctggagtaaggacgccaagctcttcctaaattcaccttcccatccccaaaaagggaacctccttcaaatacaaaaccacttggatcatcttgtgactttcgtccttgagctgtaacaaaacctggtccagtcctatttattccaacagcattgatcgagcaattctataagtggaaaaaaaaaattaaaaatattttattatttcatgtttaaaatgatttattttgaaaaagtatatttatgtaattacctcgtaaaatgattgtccataaccaaagataaaatccacttctccttcaatgtaacaatctttgaaataatgacgtccccttgcgtcaaataaggtgtcttgataaccaatgaaattacatctaaagaagaaggatttgtctccatatattcttgctgccaatgcttgtctaatattaattttacggtttcttctcctattcatgttgttatatgtgttctgcagttaaataaaaatacattagaaagaagaagaagaaaataatagtgaaaagttattaaaatggtttttctatcatttgttatgtaccatgaaaccaatgttagtcacaaccacattagttggccatgaagtgaatgtagcgctagtgtccattactttgtagtcccagaaagttatgattgttgtctggctgccctctccttctaaaatgatgcagggcttttcttggggaatataaatctttcctctgcacaattagaatatgggaataacaatatacatttggaaaggcgagtatatttctaaaatgcgatccaaattcaagaaaaaagtacacatgaaaaaaatccaaacaatatgggtattgtcttcatattagtagaaagaaagaaaaatacccagccaaatttgaaaagaaacatgataggcttagaacatgaaaggagccataaaatcaaccaatgactagttaagaaagttctttttctaggcaattagtttgttgaacatgcatacattcagaattatatgtctggtgtgtgtatgtggatttcttgaagctcttttagtaggaggagtcatttgtagcaaactaagatgaattaagagtaatcttaattgttataaatgattatgaaataaaccaagtattgctgttgaaaaatggaagaaggtagtatgatgttactacataaacgaagttgtattttcctgaagtttcagccatgaagaagctgaaatggactctagtgaatgaaaactgctgataaattgattttgatcaatgcctttttagcagaaaagaaaaggaattggtcctgttttggtccaagatcagaaattctaaaaaaaaaatggtcagccaaaaaaaggtgttttatttaaagggtaccaaaggcaagtacatgttgtataattagtagaactaaagcccccctgcagtggtatttgccctgcattccaaacaatacccacaatttcacgtaactatttctcttctcctttgcccctacccgagactatgttgttgctgcaccattgtgtataaatacatgtattccacaaggatgcatcacacaaaccatcagataccagataattagtagttcatatttgtaaacgttgcaaataagtaaattgtgaactaacttgatgccccctttttgactttccgcaagacattaaattgtttcattgtttttagttgttaagtaaatttccgatagatatgttgtctgcctattgtatgagtactattcttgtatgatttaaatcttgaatgcttccttattaagtaaatataacttatagttaagtgggcttgctttaattgcatttgttcatgtattcatctgtgttgtatgatttatatatacaagctttaacatctaaaggaatttgtaccaccatttcatggagcttgagattatgtagcatgtagtagcattatacataatgatattggcttactgatgttatgtgatattgattatgaaatggattaggaaatacagtttggttcatttttttattaaaaaaaaacagaaccatgcacacgtctagactaaacattaaacaatactttggaaagaacaaaccaatacttaataataacatttcaattcaacttacgtgtataagccagcttgcatatgaatcttgacccaccgatcattgttgtttcttatcgaaccaattgcagcttgaattgatccgaatgttacgttgccatgcccaccaacagttatggtgtatgaaatgtccttcccgccacaatctattttaccaagaaaaaaaaaaaaaaagttaataaaccaacaagaaaaacaatatactttggaaaattgaattgcttttgtaataaatagtaataaattacaaggaagttggttgcttctgtaatttatgtgaaacaaatttaatcttatgtttgtttgaacgaagaacgagaaaaaattacaaaatttgaattgaaaaggggaaaaaattaatagagaaatcttgaaattttgtttcttttattaaaacatattattattttttccttttttccccctctttatgtgaacttaacatagtataaaccataggtaatagacatcacattacatctaaatgaaaagttttgaaccaaatttaacaaactgattttttttttactttctcatttctaaaacaattttgaaaataaaattacgaaacagattttatatttttacagttgatttacaaaatagtttttaagaactaaaaagaaaaacaaaataataacttttatagtaaaaaaaatgaatatcagtgtgttgcttcttttgttcggatcagaaagtgtgctaagctttgaacgaagaaagaatggatggattatcgtaattaagaaagtaactttattaattattacttgaaagtataaatcttattaattaagctatattagtaaaaaaaatgtcagccaagggaaattcattaaagaggtaccgaaaggaatcagaccaagcaattggtttgtgcacttcatagtccccttctcgcatatatgagatatcagatatacatataaactccccatcaaagctaaccaactatgaacaatgacatacagttcataataaaagacttctacaaaaacgttcctaccaacatgaattctctactgagtccctgccaaggtttgtgttgctagctatatccaaatatatatatatatatatatatagcattccaaatccgagatgtgtttccacgtacaagtctttttaccaacccatcaaacaaattagtgctgattaatccaatcatacgtcacgcccaggacttcaattgtaccatatatatcccaaaccaagtaaatacatgaaagaagaacatgcatggatcatacctccacttcgagctgatatcatatgcatgccaccaaacaatggcattattgccaacaccaagcacccagggatgatgatattcatgactccaaataaaactttaaactttggttcaaaatgaaacttgagaggttaattcgttcaaaagaattgcaaagatataaggggatgatgagaggggaaaagagttctcataaaaaatgtacgttagtttatggcatatgtcaacaccagtgattcttaaaatgttattgattaacatttttagaaaaagctgagcataccttatagtagtaattcttttattaacgttacggtccatacacggtatataattcctataactttgggtaatgatgtcccacttttgacaacgatacggtagatacctatgtctatgtatattcttaacaacgccggtgtatattctacttgtgagaaaaaatcctgcatgaacaattttgctagaagtgcatacatttccaaagttggctccatgccccttgttttgagtttgttaccttccggtttctgctctcgtgagtcatatacattctactaatggcaatggaaaacacggaaatttttcatccagcttccttcaattaattaacatattgcttcattaattagagatgtaaaatttgatgctggccggttaggatccgtgactaagtttctcttctttttttcctgttttgtcctctattctccttggtggtttatggtacaccacaaataatgatcattagattgatctcatgtccacaaaactatgatgcaccctctgcatcaatgcaccaacgttcttcctctcctcagtgtcatatagtttgagactcaaaactgcagaggatctgaatttttggtgtcaaccaagtttccagaatgttagcttgttcaaaaaaaaaaaaaaaaaaaaaaaacttgttcattatttataattccaagtttcgaacgataaacccttttccatcttttgaattacttcaatctcaacgtgtttggtggcgtaaatggaaattcagagaccgtaagaaacacctcctagtttggacgatgcagtggcgaaaacgtcttggtcgttttgggcttgtcggaggaggtgcattataacttctcatacaactaggaagtttaacggtccatattataaacaaaatatatgatcaccataagtcacttattctactactctaccttagcatcagtattgtacaaattgtctaggccatgtaaaaaaagaagtaagagaatatgatttacttcttgtttgactttctcatgtaatcttataaattaattttttatcttttaaattttgttcaatttgattcttcccttaatttataactattttgttaataattctaagataatgaataaggatggcaatgaaatccgttctagtggattctcgttccgactttgacaattaatacctaagttgatcggatacgggttcgaggattatccgactttttaatcaaggttggggttagagatgagaatgtcactatcagcatggtagtcatatttatacccgtcaatcagtttatttttttgtagacaaatgtcctataatgaatttattgataaataagtagttaaaataaatatgtaacaatgaatttattttttctaaaataagatttttaatatattttttacaaaaaatattttacaaatctgaaccatagatggggcaggaacatggatacttgacacccaacgggtacaaaaatgagaaatcaaattttaacatgtcaaatatcgataacaagtacgaagataagttggaaagtcgagaactcaggagacaataaccttccccgcccgatccaattgtcatgtctaataatgaaatatgtcacaaaataaaatttattggcttggacgtgtttcttcaagtgtaattaatatagtgataaattttaatatatatatatatatagcaattattttgagaatgacgtgtttaaaaaaatcttcttttattataaagtaaatagattatgatgttatgtgtgaaaatattaaaaaattgataaataaatacaaatataccttaaaaaaaatcaaaattgtgtgtgcgcgcatatatatatatatatatatatataatttatagtattaataataatatctcttattaatcttcttttgacgtatttatatttgcattcaatatattaatatttattaaattattaataaatttctaatataatactgataataatagtattaatatatatctgtaatattattaatattaatatatatatatatatatgtcaatatttgtaatttttattttcataatacgaagtggtttcatttgatatatcctctttctctttatatataatggactatgatttttctatttatttttctctacatctataaatatatatacaagtttttaagaatatatatatatatatatatattagtctttataatgggtgtattatcttccttttatttatttatcaaaaaacttatgaaatggagaaaaagaaaataagagaattctaactcatataaaatgacatatcaagtgagataacttttattataacgtatcaagatatataaaaatagatcacaattacacataactattttaaaagttcacaagacttattgatctatatttcatttacaatagcttataaacaaattatttagattcatattataaatttttgtgagagtatttaaaaaaaaaacttataaaaatatatatctttcaactgctctaagatacttttaacttttttttcataaactcttaaaataacttacaagagtagcatatgtgtagcttattggaaggcacactggtgaatcatgttaggcacatttatagaggcataaatgtattttttatacatatttatcattttatacatatttatttttcgcgttaagcatctttaaatgatgaaattttttttgtttttatttagcctttcatatactttttatttatacatgtgaattgtatatttttaagcttattgatcattaaatatatatcatgttagacacatttttatttagcctttcatatactatatatatgattttaattttaacatcttaatttatattttaatttaattatgttatgattattaaatatctgaattgttttaaaactactgaaagctatatgattttttaacacagagtaaagaataaaagcaaactaataacattcgcagagtaatcttgatgtgatttttctcttggttaaggatatcctctgaagaagacatagttatatacttgcttccttattttatattattttatttagttttatttcaaccttaattatttatattaaaaaaatttaaagaggtattatagatttgttaattactatagattttgagtataggtaattaagatgataacatattagtgttattgcagggatagctatcattcaaagaattataacaaaatataatgatatcttgtaagaaattggtaaagttgtttaacaaacagaattttttttactttctcatttctaaaacaattttcaaaataaaattacaaaacagattttatttttttataattgatttacaaaatagtttttaaaaactaaaaagaaaaacgaaacaatatcttttataataaaaaaatgaataccagtgtgttgcttcttttgtttgtgcacttcatagtccccttcccacatgagatgtcagatatacatataaactccccattaaagctaacaaactatgaataattacatacagttcataataaaagacgttcctaccaacacgaattctctactgagtccctgccaaggtttgtttgtgtttctatatccaaatatatatatgtgtgtgtgtgtcaaacactagtgtataattcttaaaatgttattgattaacattttaagaaaaagctgaacataccttatagtagtaattcttttattaacgttacggtccattataattcctaaaactttgggcaatgatgtcccacttttgccccagtaatttaatgattagaaagtatttccttatttaaaggattagaaattatgcattcaaaaaaaaaaattaagaatatttccttgaatatttataaatatagttaaatgtaacaaaatatttcttatttaaggatattgttgatgagtaaagtaagaatattttcctgaatattatatttttaagtaaaaagataagccaaatatactctctttttttaatagtcaaacatctatctaaatctcattttaattgcttacatgataacacaataaatatttggattctaagtaataaatgcattagatatatataatatagataaaacgtaagatcattttctattaacaatttgaatttggtgtaacatttttagagttaaatcatcgtcattttgaatttttgatcccatcaatctgataaaaatcttaataatttattgattataatatatatgataaaacgcattaattgtggaatgttagcagcaagactataaaagaagacaacaccttggaaacttaatttactccacaccgacagcaaccaagtgccctttgattaaaacaactccctaccacaaaatgaattctttagtactgtgttccctattgctcaccctttgtttcttcctcattgctcagtctccttcgctaacaaatgctagagatcttcataatggttacgtcctaattgcccaaaccccaaatttgcaatgaaaaccaaccgaacaagattgcatgcacgaatcttctaagagcagatcctaaagtcctgggtgcaacaaattttcttgaacttgcagaggcaatcttggagttgggctggaagaagggaatagagggtgaacagtttcttatggtattggggacgacaaaagatgttcccgccgccattgcaaggtgtgcaatttactatggaagtacggttgattcgtttaggaattctttgagtaagttgaaagacgatcctcgaattgctgactatttggccaaaattgctggtgatggacctaaatcatgtgaggaagacttgcgttctgcacatattgttaaccgtgcaatttcggctcttgaccgccaaacaaatttgcttagctatattgcatctctagccacagatagacttattaaggcatagttgcaccttcaatctaaaatgtcttactggtttaattagcatcttctttgttggagagagtaattaataaaaatcaaaatcaagttttctgctatttgtttttggggtacgtaagtgtttaccattatcttttcttgagaaagttttaagtagacatgatgagtgtctagttcgagttttatgattgagagaagagaaatttattaaaggtgataagttaatttttttgacaaagatgatcatcaataaaataatttatatcaatatcatgattacaaaaataaatcatgaagtttaatggtaatgaaatgataatacaaaatactctaaccaatatcaaagaaaaatattacttccaactgcttaaaaaaattgttgaagctctcacctcaattagatagtagtttaatggtaatgaaatgataatacaaaatagttttttttttatgtatttcaaggtaatcttataaaagttaacaaacttatcatttagatttaatttgactttttatcttttaaattttgttcgatttgattcttccctcaacttagaactatgttgttaataattctaagataatgaatagacatggcaatgaaacccatagccgaaggtaccagccttgactttgacaaggaatacttgagttgatcaggtaccggttcaggtttaaagattattcgacttttttaatcgaggtcgggtcaaggatggagatgttactatccgcctcatactgatacccatacttgctaatcagtttatttttgtagacaaatgttctttaatgaatttattgatatataagtagttaaaaataaatatgtaacaatcaatttattttttctaaaatcagatttttaatataattttttacaaaaaaaaaaaaatcacaaatctgaaccggacacaaaaatacccgatatctaacatatacgagaatgagataacaaatttcaacccatcgaatataggagacgcatacgagatatgttgggatagtcggagtcggaaattgagtagccaatattcatcatccctaccttgtccgttgccatgtttgataatgaaatgtcacaaaaaaaattggcttggacgtgtttatgcaagtgtaattaatataataataaattttaatatataaatattatatatatatatataccaattattcacataatggcgtgtttaaaaatcatcttctttgattataaagtaaatagattatgaattgtttactgaatattataaattctttgaaatttaagccagtatataagactatcacatgaaaattctggattttgggattcatttctactgatccgttagatgtcaaacatgtgaattggaataacagtcatacgctaaacatttcaattagggcaggataaaatttggtcgtcaagcgtcacataatttgtatggggagatgagatccgtttaaatcgatgtaagaattgatagtttcacatcatttaataaatttttattggataagtattttacaaaatacaccgttagattgaaagcttatattatgtagatcacatgtctcaaatttcatattaatccgaaatcatttgatacctaattgatatatataaaattaacataatatatacttctaaaatatgtgaaaattagactatttgattacatttctattgatgtttaaattttgtgaaatttgaaaatgtgatttatatgatataaactttcaatctaactatgaattttgtaaaatacttattcaataaaaagttattaaatagtgtaaaactatcaattcttacacaggtataaactgatcacatctcttgtatggttgttgttggttgttattctaaaggctaaaatatgtttgatacgttttccattcctataaaattattaaaatttatttaactttgtacaaaaaaaattattttttatcctcgcaaattaaaaatatgatattttgaatcgaaactaaatttaattatgttcaaatttacgtgttgatgactaaacacataaaacctagtaaccaataagacgttgacatatgtttaaatccaatatgtgattcaaccccaaatctccccttccctccctcgtgctcttctccccatgactccgacaatgacacataaaacctagtcatgctcactttgcaatccaaccaactctgaaatttcaaatttttttggagacactcacttacgttctcgccttcgagacgctatattctctcatctctgcgattcaagttccggtttgggggatagggatctgggagttagaggtggtggttgttttagttcgaggtgtggcggtgacggtggtttaaggtgcagaggttatagcttattcttacaaaaaaaaaaattataatttgtgacaatttttttaatagtcacaagtttttattttttctgcaatttctagtgggtttaaaaatccgctaaaattgtatattaaaatttaaattaaataaaataccacacggattagaattcgccaaaacctagctctagataaaaagtcacattttaattttgcaagaaccaaaaaagggacaaaaattttaaaggaacaaaaacaaactttgataattttaggtgaacgaaaaatatattttactctaatataaaataatagactcacggaaaaaaattcatgctaacctgaccaaataaaaaattctatattagtattaaaataaaatttaaacaaataatgaaaggttcaaaaatgtcagataatatattttacggttgtaccattcattttcttatgccctttttgacgacaaatatttgtaagtaataacttactttcaaagttccatttcacacattttgaaagtgccccactcagctatcttttccattattctcttcatcctcgattgcgtgggttacaccaacttccgctggccgaataacacgatcataaagcatatatcctgcctgcaaacacaatcataagatacccttttattcatgttttcaatctcctaaataatctgcccaacaaaagtaagaataagaccacattccttcaagaaaagtatcagatgattgggttaaaaaaacataaaagctttgtcataaacactgacaaagatcaaccagtacttgacgcactgcaaatctatagataattaaccaaactgtgttgcatatccaacacgattcaatatgatatgcaagagaaatgtttgcaaaacaccttttattattaggtgagttgcactcgagtcccactaaataaagtagggaccagagttattttaatgacaccaacatgaaacaaatcgaataaagcatgttaaaaaagtgttgctagctcctccaataagcaaataggaatattttaaaacaaaataaaatacattatggtaatatatattgaataaatatttgtatatctgtaactaaattaaatttattcagttgttattctttgtgatgattcttaggatggtaagatagcaagagtgagaagtgctttgctggaaggtgaagggtgagaagttgagagcatgacctggatttgaatctcagtagaaaagatatagtaacaacaaaaatacgaattcaatattgttggatatggctcatctttcgcagtcagatgacaacccttcttgttggcggggtcagcagaaagtcaactggggtcccgctcttttctgtttttcgaattgtgtgtgattgtcgatttccaacaaatattaccataaaagtaacagtgttgaatatgaatatgatatagatatgccaccaattttcaagtaaccatgcatcatagacaaaaagagcacatcaagagttttgagtgtcaaaacaaattttaaaattggaaaaattgaatcacagtccttccactgtatattaccttcagaacagctgcaacagttcctggaggcttagaaccatcggggatttggaagatggcattatgcctgtgtggatcaaagggctcgtttgtaggatcaaacttttctacaccaaacttttttagtacctgtaaaccgaagcaattagttttacaataggctgaagcctgaagcactttactgtccaaggaagcatattatttcaagcatacaataatatattgtatagtaaaatgaggagtggcaccacactctctaacacactcttattgataaaaatttattgaaaactacaaaatcatgaatgagattcattaaatatggagtggaacccaaacatttttgtgatttccgacaaattaaagccaatataagactgttagaaagagtgtacttctcatagtaaaatataactggaaaaaacttttgtagtatgattataagttgagtttgaaacatgaaggaactaaagtccttccccaaattccccagttcccaacacacccatcaattcatcaaaattcaaaaggtaaactaaatatccaatttacaatcaagccactgtaaatcaagtgctttcagtacaaaataattattctttttttaaaataacaattcataaaatagttatgagaaattggaataagaaaataatttccaacatgttcatgatttaaaaaaaaaaaaaaaacatcatttaacacagaaaaaaaaacaagccccacctaatctcacagcacctgaacaaccatgtcctcaaacttggcataaagcctctactcctagtccctccaaatcacttttaccgtaccctcacattcactcaattaaccatcaatcgactatcattactaaacaaaactatataaatgaggaatttagatagctgaaaagaaatggggattaaaacttaaatataaaaatgagtagaaagaaaatattgataatagattagctatgacttttgaaattaaacagataaaacaaaaagtataacattctacctctgataattgtttctcagtcatttcaacaccttgtagaagtgttttcaggagtttcaccgcttcagcagagtcaccagccgtatcaatttttgaaaatttttcctttgcaactgaggaagctcttcccaaattgtccgcaacatccagtaaactctttgcaaaattctacagcatatttaaaccactcagaacacagttgaaggggaaatcatttgggacaaaagggatcaaagttggacctgtaaagcaaatttttttgaattatctgcttcacgtctagtcctttccatgacattctccatctctgcataagtacgcagaactttatcctgcattttttcaatctccttgtgctttaaggtcacaagttcttccttttcaaccacaagtttaattaaatcatccctggataagtcactttcactctctgaatctgaatcagaaaatgcagtccgtttaaaacctctcctccttcttttgacagtttgagattgagaatctgaaatagaacctgattcctctgttttatctgcaggtttatcttgtttagcctgatcattattctttgcctcttcatttacttttgcagggtcatcatttgtagaatcttcattatgcacattatttcctttttccttgtcattattttcggttgaagctgatgaagaaaacccaaatcttggagctaataatgaatctattggtggcagcaacaaattgatttgaacaggaatcacctggaacattagaaagcatgagaattttaaaatacatcaccaaaattcattagataaaaataattgaatcctagagaataggctaatgatagtcaccaatcaccatataatcatatttcatagtatcatatactacatcagaagaacaaaaaaatttggggaacctattgttccttcgtacacacaaggaatttaaaacaccggtaatccttaggaaaaatattttaaaaaaatgacagcgaacaagaatgagaatggggatagaatttagaagacaggacaggacataacatagtaagataaaagctcaggcacaatgttctttatcaagagaaaaaagttatactcatatttcatcgaccacttttttcattaaatacttatttccacacaagagaaaacactttttataacatttttttctcttttaatgtaataaaacacaacacacctgataaaaccctggcaaaaatggacaatcaaagtgaacagcagaaaaatgacagaagacatttcatcctgatattgtttttctaaaccctaaaatgacataaataaaatttctgaacatttgaattcaaaaccaatagctaaaacagataaattagcatcaaaagaggtacaaaagcaacaattaggggtaacactctataatgcaacctattccaaactgcataaattacgaatttctgatacacaatctgtcatgatccctaattaaaaaaaaaaaaaaatcatcactgaaaattctaggcaccttagttcaaaagttaatatattattcaaaaatacagctgaattcaaaaatcaatgaacagaatccaatcgaatgaaatagcgaaacggctaaaacagtcaaattaaaaagcaacctccttaaaccctggcaaaaccctaaaaccaaaaaaagaggggaaatcaaaggattttgggaaagtgtggaagagcaccttgttgggtgaatggggaagaagggaatgtaagttaatattggagagggtggacaagtgttggggtgtttgcgaagcagagaggagagaggttcggaaaatggtggtggaaacacgggacaaaaccctatgaacgaacatcgttgaggacgaagaagaagaaaagttgtcgaataacagaacagaacagagtgtttatgcaaaaacagagaaaagagaacagcaaagtctgtgctcgcggtggagagagaaaaacataaattggtgaggttatttattcattataaacgacgtcgcctctaagcaatacatctccaaattttaactggagtctgggaggattgttaacagcacacttttctttaattaacacctattcatatctctcgctgcatagccattaaatttattattattgtttaagatttattgaaaatgaataaataaaaaataatctcaataacattctaaacaagatgggataaaaaaattgattaacaaattttcatgggaggacaatcaaatttaaaaaaaaacgattgaataattttttttataatgatcactattttaaaaagaaataatacatataacatacttaacgaaaattctctaaagagattgacaaaattaggaattaaattttatttataaaaatatagaattatttaagattatttgttttaggaggattatttattttttaagcaacggcacttgttatgaatatcatctatgttaaacaattactctgcttacccttttttctaccatgcatcgtaatcgtaatggcaggtaaatattttaataaaatcctaaatttacacaaccaaaccaaattatatcatgactaatagtaatagctacattttatccaacaacgatagaaagcaaaagttcaaaacaatagaatagagtgtttgtagtgaataagtgtatcaggaacatagcatagcatgggccatgggcatggctttcactagagccgaaaatgtttttcctaaaagaagaagatgactaacaagctgcagcactccattgttcttcaaattgaacatgttggcacctccgaaatcatggattccatgtcacgctccttggaaaatttaaaggtgctacaatcaccaacacgaaaagctttgttgcatttgggtccggatcctctcttatttacgtaacctggatagtcccatctaaaaaatggcactttctcaaccaagaataactctgcttcctctgccagtgtcactacttctcagttattaaaagggtgagcattcttcggtgtcatgtgaatttctccatcttggcttaccatctatcttccttgcactcttcaaaaaccccgacaccacgtgcttctgaagcctaagttaaatagaaatacgtttagaacgtgtgtatataaaacattttatgttttcaatatttggtgtagtagtattgttcttcctataaacttactcaatctggcacggatcatgttccctataaacaaaaccagcatgtggaaaattgaagacagtgcgatcaaaatatttccttcggagcagcgggtgtttgttcatggtatgaacatccacttcatgcacaatggtgtaaccaaggttctccaatttgtttaagtttgttgaagccctggactggagtactaccctattaatgtcactaattaaagattcatcgtttaactagaaaaaatggttagaatcaatccacaaacacataacaaacgcagtggtttctaaatgagataataatgtgtctcaccaactattaatgactcacccataattttatgttgttttctataaattgagtcaaatctcatgagataacctacagttttaaaaaattattagaaattatgttagagtttgtttggatataatgttataagtgcttgagagtttatttgttgaaaaaaaaatattttcaatagaaaaattttcaaaaacacttgtaacttgtatctaagtagacacttactacttgtttcttttatatatttcagttatgacaaaaaaaaattgccagtaatagactttcatacccgttttagttgaaatttattagaatatactaagttttactccatgtatgaaaagtttcatacaaagaatgtttgccagcatttttcgaaaataatgcttattagttgaaaaacactcggtaatagtatttagtaatggtttagatgaaattgtttaatccgaactctgatgattatgggtccactctattcctacattatttcctacattattcttgcagcagctcgggtgagttagaagggaataagaatacatgaaagttgacatcatccatggttttaacaaaacccaaaaagtctattttaaccaaattcgacttgtaggtagttgtgtcatttggccactcggtacatacataaaatgagtatatgcagcaacggattatttcaatatttcaattaggtgaccaaaatatcccaaggtcatcatttcaaattagtgaactgactaacggaggtactctcacatatcaggtttaattagaaaaattaggtactaatccaagattcaaacttaccaaagcaatacatttccttgacgactagaccaacctgttaatcattatatttagctacactaaacacaacgggcttgatgcaaacaagtaattgtgttttgtctttattttctgtcttgacacttgattgtagatgacaaaatattcataaatacaaaaacatatattgaattataaaacttcctactagaaaagaacggcgacgcatggtacataaagatctcatgacgcacatgcattgcataaagaccccgtaaaatttgtatgctacaaatgtcactaactaatctaattatagcactgactcaattgctcagaaatttaatcatagggattcctaaaattcttcaagagattgggaatgtcgtaagctaacatgtcatcaactgcttgtatcatttttggtttcaatttttcaaacttatcaatattgtaaccactcaatctctctctgaaaaactctacatttggaaaatcgccaggaggtaaatggaactccctttgtacctgtttcaaagttgtcagtcatgtgtatacattttaagtgttgtcagagacaagcagataagcaaaacggatgtacacagattcatacctttccaaattcagctgccaaattatcgatgagcttttgttgagctttagctttgcccatcatagcaggcatctcctttttaagatgactgataatgtaagcatgtatcttggctgctcgggcccgttttacaaactcattgatctataacagtcaatatatacaaatgataaattaattatgcaaaaaagtaactttaacaatttaaatataaactggacactgaaattgaagatacgagatagtcacctacaaaaaacacctgtagaatttataccataggaaaggagactattgtatcaaacttgtgtgtggagtgcggatgacactaaaagctgataacattagttttcttaatttttaatttcacaaaagaaaaaacaatctaatcgatacgctggctttcttgtagtttcactaaaaaacaatctaatgacactaaaaaactattgtatataagggtagttttttaaactcttttcaaaactaataactcttttttaggtccatctttaagttgtttcaattttttactttcagtttgtattactaatgttctttcttgcactttcacattttccccactctttctgaaaattagttcttgaaaaatgttttataaaatagtttttaaaaactaaaccaaaaacacaaccaaacacacccaaagtaacctcattttagtggaaaactattcttatgataaagaaaataaatttagttaaataactcactcactcttcgatcacaagctgcttttggtacatctttcagatccgagagaagatcatcctgttccttttcaaagagttccttcccaagtggaccagtggcagcatcatttacaggtttgtcattgaaggagcttccataaagaaggttaattatgagcaaatgagcacatggcaatctcataaacaaggaaataaatatacagttatattatgtctaattgcatagcaaatggggaaggcggtgtggaagagatcttccactgagagtggagaaacaaagcagtctctcccccaccctccataacaaagacaacacttgaacattgagtggagacatacccaatatacactcgcattacttcaggtgtcttcagcaccttcccaagtgaccacattaaggctccataaaccctcatcaactgcaacagagagcccaatataggttaagatttcaccggactaggttgtgaaagattcaaaagataaacaaacagaagtttgactacacaagctcttacttgttgagtatcaacttggtctgccttgttcaaaactactcggattttgtcatcatgcccccgtaaggatgatatcacacgattgaactcatcactgatgtccagtttgtgaggatcaaacagaaggagtatcaaatcacacttagcagcaaaccaagatgttacacccgtaaaatcatatgctcgttgtgtacgttgcttttctccagatagaactccaggagtgtcaacaaatgtgatgtgttccagtagctttggacaattgaaagagtcaattctaaatgctataaagggaaatctcgtaaactttttgaacagatctagatcaacttacaggatgaggcatttgtgaacacacaaattttgacaaaaatgctgtgccaaaagttgtaagaccactaaatggcatgtctgcttggacagcaacagtatttccgggaacgcttctctcatcagatccagactgtacatcagcatcctttgctagttaaagtataaaactaatgcaataactcattttcaagatgactactagattaaaggattattaagaaaataatttaaaccatcaactcttggcactaatgctatggtacgaactactgagttccattgccaagttttagaattttcatgttatgaagaatagacacacaaacacagggcgatgtcctaaacatgtgtgagcatgagcgtttgcatgtcaaatggaattaaaaaagattaacatcacaaaatatctaaattgagaatctgaatttatattcaccctctcaaaataacttgttaagctttacttatgccctactataatgagccccacacaaaaaaaaatattaagaagcatcattttacattttccctaaagaagtttctttagcattttgtatcttttaaatagtttatattattctttatattttaagttgatttctgaaagttaaaacattttttcaaatttataaaatagccttgtcttttgaagtctcaagcgatatttaggtgtcagttgacagagttgaatgaccaaaccatgttaacgcatgtccaagccatcaacaaaaaattaattaaacaccagtttagtagcgtccaacacatgtcatacaaatgttaaagaagtgctagtgttggaacttggaagtatgactgacactgcaagaaatagcagtgttgatgcttcatagcttccaccaagatgttagtcttgccagcaattagaagtcaaattgatttattagtttaaaactaagaaaacattgaaggtaatagagagtcgtgggagataaattgatttggcttacacataccatgacaacaacaaacctatcagttgttggttcaggcccaatatgtgctcctatcaacatttatgggaaaaacaagacaaagattaataacattattttaaaaaatatgttatatcaccctattaatcatcctaaaattttacaaagaatattaaataaaataaataaatgtatttaaaattatttcttcataaaacagaaataagcaatgtgagaaatacatatatggatatagtgaaaggagaatcacgtgcctggataactacttttaagcagatgtttgataaatgttgttttaccagttgagtactgacccaaaagcataaccattggtttggcatcaaagtcactgtttgtctacaatatgaaaagaattacaatcaataacaaaattaattgtatatctttgtagatatttaaaacatagtgacaacatgagtgcataaagaaaggtagagtagctagtcatttctaaacaaaataacttactgaccagtaatggggatacaaaatcattaaaacggtaagtaacttctaatggcttcaacttctgaatgtagagtctcttcaagccgtcaattattgatgtcacagaggaaagaggcacctatgaacatatgtaccacaaatacaagtaaaaacacaacaaaaataatatttgacaattttaaaaaactggcaataataaagaggtaacaaatacagataaaaggtcctagagaacatatctataggatgacctttagggtaacattaacttgattcatataacattagagacaaaattagatatttagattgacacgagacaaaatgcacattttgttaagtcaaaaagaagaaattagataataccaattctagattgacacaacaatattcacatgtgtagtatcaggcacattactattattggctaataatatcagttacacatgcattgaaattaaataataaggttggtttcaggcccgaaataattacttaaacacatttgtttcatcatcttataaaagacagagaacaacataaccagaagtttctcacatatactctgcaagatcaaaagaaaacactaaacgaaaccagaacaacctaaagccagtaaagaatgacaatcaagttggccattacccattagttgaaaacttgaaatgaattctagtggactggaaggtaaggataatgcacatgaaatcaatcaaagtaacagtaacagaatgcttgccttttttgttgactttgaagaaaaccaattacttgacggcgatggctgcaattgagagctacctgcattattgctaactactgaacttagatttttagaagaaaagaacaaataaaataaaataaaatcaatatgaatgaccatatttagtaaaacgagaaatatattaccatttgcatcaacctctttttgtttatgctttttcttctgggtaaatacgtcaaatggtcagaactttcactaaataagcataaaaatgttaacactgtaaaaaaaatggaccttaaaaagaaatacttacagctagtagtacgtccaaaccctccattgagggaggtttcacatttgtaaaatcaactgaaataaaagttaagcttccattaggttaaatttataagaagacattcacaatcaaatcaaaatatgtaagcaggcacaacaacaagaatgtgctacaattataagaagttattcaaacaaagtaatagaagacaaacctaaacatacattacttaccatcactagtcagcagatcgggtgttattgagtgcccagattgagccaaagaaactagctacacttcagatgtgtaagattttggaaatttatcagcattgaagttcaaaaaaagcataacatatttttacctgcatagcaatgataaattcagtgaaacctagatatccttgtcgctttgaatctgcaatagcccacaccttattttggtaacagaagcaaacaaagaagcactttagttagcaagaaagaaagaagccaacagagatacttataagcaaggacaacaaattatattaacaacacaagtacacaaccattaaatgcccaaaccatttcagttgttatagataatacaataccaaaggcaacttctacatgagatatattgtaagagttcaaaattagtccattatcagtataaaataaacaatatcaggaaaccataaagtgtcacatcataagtgtaataaaaaaatatttcatttgcaaaaatagttgacaatatttgacaatatgcttcaataacaggataaaattctctataccaacaatgcatcagatttgaatctgaattgcaaaaatcaaaaccaatgtagctactggataatataagaagcattccccaaatcaaaggacaacccgattcaagaccagcaactaagtttgactcggcaaagtgaaattgaagagggatttaagataggaaggatagaggaagttcacagttcactagtgcatgcttgatagcaaaggcagagaagggaacaaataaaaaatgaaagtaaacaacattttgttttatattgtttgaaatgaatgagataataaatgaacattaaaccaaaattggccaatttgtaaaaccatagaatcccagtgttatctctttctacaattgcatgtacacttcaatttcacctcactttatttatttatttatatattttggcagagacaacagacatccttcatgtaaggtagtcctgattgagctagatagaattactatcggcagaaaatttaacatgaatatttaatgcaattgaatagtcaggactcaaatttgagaacactaattaagttggaaacaaccatatgtcaattgattcaggcaatcagtggttcacctcactaacgaggaaaaccaataaaaaggaaaaggtaggccatgttaataatgcccaacttttatcacttttaacttcatcccctaaccaagcaatcatatcttagaattttggcacgtcattccgattacctccaactcctatctgcattcattcagtacaatacaaaagaacgacaataaagaaagaaaatgaaaaaaaaaaaaaaacgggaaaacagaaaacctgcttaagatcttcgcgggacaaattggacatggcgaaaaacttggtggcatcactccctgtaatgcggccatcgctatctgaaaaacgaagtgcacggtgaaatttttggatatgaacaggaacagaccatataaaattggaacaaaaaaaaaatactggaagatgaagtatgctgtgctgtacctgaatcagcgcaactgaaccactccttatagatcgtctggtgttctttggagcacgaaccgattgggatcgggtcgaactccattggtcgcagaaaatcttcggaatcgcgtgtttgagatctcgtagtgtttgagatgctgcgtttgaacgctttttaccttctcagggaacagaaaacgtgagcgttaaacgacaacgaggacttgcattagcggtgtcgtattggcgatggaaactaacgagacagagttggcgcagaaatgctgctttaacgattcctgtttttgtttaccaaaaaatagtgccaagttagtgaagttgggagtttcatctgaatgcgccaaattacgccttgtcgcgcacttcgcactcactcacctttgcttgctgattcagattgtcatgttaacttcacgttaatatggaaattcgtgtcaccactctattcttcgttttattttttttattttaatccatattgttaatattttttatattaatttgactattttgaggataattcttttaattggtacccatttctatcttctgacttttttttataaatcatcttttatctcataaaaaaacttctaaggtgacaccactctattcttcgttttttttatttaatactctacaaaaaattaaaattatttccttatattttgtatacacgcgcttaacatcatcataaacaaggtaagattatttttatgaaaaaaaaaatatagcgtaagattctattatataaataatagtaagaaattatattgaagttgtttggagaattggatgctaaacgaaccgaatctcccaaggaacctctttagtctttacccttttgtcaacctttgatttttacttaattgacctaggaaaatttcttaattgacctatcttgatttgctgacacatgtccttaacttgttagatatataaataataaaaagagaaaaagaataaaggttgcttgctttggtttggttgatttcattatcgaatattattattgaaaaagaagaaatttgttgatggattactacgggttttgtgactaactagttttggtttgcttgattgaagatcaaggaaggaagcaagatgttgggtgttataaggcacaaggtgctgtctgtgtctgtgtctgtctgtgtctgaagtctgattcctattccaattacatttcatatgatttattttatttgcagagtattcgccctgccttctccgcagtcagacacttctcttctgcatctaaagaggtatgcattattgttctcatctctaatctcttaatctcttactatcaaatatcaaactcgccagtgttgtttcgatgcagattactgtcagggaggctctcaactccgcactcgatgaggaaatgtcagctgatcctaaagtgttcttgatgggtgaagaggttggggaatatcagggtgcatacaaggttggttaattagtttagttgtcttgccaacctcaccttttaagaacttcattaacttaacttccttctttcattttagatatccaaggggctgctccaaaagtatggccctgagagggttcttgatactccaatcactgaggtcgtttttcttacttcatactttatttgcatctcttcacttgatttattaatggtgatggctttgggatgcattcctttgaactgtgttgttcttcatgcttagcagctgcttctaactttccataatagattgcttattgaacgccaaaatttactttttttcagcttctcactttaaaattgataggaaaataagaacaggatttatttatagttggttgcagctgttggattgacttttttttttttgtgaaatataatacaggctgggtttgctgggattggagttggcgctgcttactatggtctaaggcctgttgtggagtttatgacttttaacttctccatgcaggtttggagtttatcttgattgcatcctttctttcttaaattgagtgtgaacttaagtgatatatttttttacaacagcgccacttaatttatgtatatgtacaatgttatgtaaagtttactgtccaagaagatattagatggcattgtatgagtcttatcttctgtgtgataagataccagggttatgagattttcaacacatgatgattcattccacaaggaaaaatgttgacttccctgtgaggctgtgttgataatcacagttatgaatcaaggatatagatgtgtgtggccaaccctagaaatgctttagcatgatagcaactattttgaagattatgtatacaagataaatgagataattaatttacagttgatacataaatggtcaaaaataaaaattactcggtgaaaaacatttagtcattgataatcaaaagttatagtgatatagtctagacatacaatcatcacaaattacaaatgttaggcataattaacaagctaataacaacaaaggatcataaggatataaaaagtacagtgccaaaccttaataagtttgagcctctaaggtgttggaggaataatgccatgtggactatgaagtgctagctacacgacacaaaaggagaaaaagtaaaaaacaactaaacaaaacagagggggtctccaagggctcactgaggtgacaggatgggagttgctatgtagaacaccagcgggttgctggaaaatgacagcaaacaacggaaaatggcgaacctcaaactagagagtggaggggatgtgatggaaaacaatgcatggcagtaaatggcatgctgctgggtcctttggccagaagaaaatgatgaagctcaagctagaggggaggcatggtggatatgacaatgtaaatcagccgggcacatgacgaaattcccaatagtggtagtgatttgacacgttttgggcttgtgatgtctgctctatcaaaatccaatgtgattctctgtgcattgtggggacaacaaacaaaatggtgtgaatttctgtgattaccctgttattaaagatataaaactaaggatttgtggttgggattcagtttattgttaacagagacaaccattcttggcttaaaaaataaagcaattttgtggtgtttaactattagtttgaacatcacattgatgccagacaaatcaatctagtttggtagacgccaggcaggcctttttgctggaattttgttacttgtcaactcctattgcttctatgttcaagtattattcttaagtatgaattatgttggaagatgaaatctctttcttctggatgaagtaagcctttatgtttacaatcttaatattgagctttggtagcttgaatgttgaaatactaataaactgtgaagaatattgtgtgaacatgtgtaatggtgtttattttgggcttcatttgtttgatatacagctgcatcatcttgatttattagctagcagattaattgttcagttttaacctttgttgcaggcaatagatcatattattaactctgccgcaaaatcaaactacatgtctgctgggaaaatatccgtacctattgtctttagaggacccaatggtgctgctgctggggttggtgctcagcattctcaagtacggttctcctagctgttttcttttaaagacaaactttatttaaccatttgagaactgataaataattcaggtttcgtctttgtatgcccaacaactttgcctttatgcagtgttatgcatcttggtatggttcatgccctgggttgaaagtcttgtcaccatattcatctgaagatgctcgtggtttgcttaaagctgctataagggaccctgatcctgttgttttccttgaaaatgaattgttgtaagttgtgctgcttgattctcccgccccaaaaaagacacttgtgctgcttgatctgtacatgaaaatgagtagtcatagattttgacatcagttcttgtttcaaaaaatatttaacttgatgaattatgtcctctagatatggtgagtcattccctgtttcggccgaagttcttgattccagtttttgccttcccataggaaaagcaaaggtagttaattatctgtagtatattaaataccccttatgatttttggagccatatttactacacaataatacattcttattgacttcttgtttgcttcatgcattttaccactaaacagattgagagggaaggaaaagatgtgactattacagtctattcaaaaatggttggctatgctctcaaggtttgtttactgttagatccttttgtattatgaatatgtaacatgtattatgtgctgtttacttgtttgttcaatttgctgcaaagtatgtgaaagatataggtttgtcttgcatttaatttaaatattaaataataagataagacaagaatcgattataactttttttctggatgggttggtgtgttatgtggtgttttataatttgttttaaaaaaaattgaaatctctgacccctttaagtagagaacattcttaaatatatcttctattggtgtttaggctgctgagacactggcaaaggaaggaatcagtgctgaggtaaaactttagtttataatgaacttccccccttttctgcaaaaacatcatttgggttatgataatggtgcgtgatgttcttatccacataggtcattaatttgcgttcaatccggccgcttgatcgatccacaatcaatacttctgtcaggaaaaccaacaggctggtgacagttgaagaagggtttcctcagcatggcgttggcgctgaaatctggtttatctctttacattaatttgtttttgtatgaatgtatcttactggttaactcttggcaatcatacgagtgtgtacttctcttgcacagcacatctgtcattgaggagagttttggttatcttgatgcaccagttgagagaattgccggggctgatgttcccatgccttatgcagcaaatctggaaagaatggctgtcccacaggtaatggttcttaaatattaattattttctgtgactggaagatttgttttcactattttgatcctgtaatgtatttctattttgaatgggtgaaatgccctgacttgatggttttgtaagagatgagttttgtatcctgataaatagctagatgctaatttgttcaaggttttggtacatgtctatccttcatttaaatttgattgcttcctggtatatgtggatgtacaggttgaagatattgttcgtgctgcaaagagagcatgctacagatccgtgcctttggctgcatctgcttgaatgttctggaaatttttcatgtcctggtcagttctttgcagaaacaaaaaatttccctaatttcctctataaaactgcaggaagaaattgcaaccaaagaatgttggttttaactaatttattatgttattggtttaaaagattctgtcgtatgcataatactgtcctaattttcaggactcacagatgctatacatattttccccatctcagcttatgtgggaggaagttaatgttaaataacttggacaacaatgacacaaggcagcaggaagttttcaatgtttttggtttctgcttggcaataactaaaagtcaactttttgaatacgttatttccagcggaccactatagtgcaagatctaacttgctgttagtttatcttcgtttactgttttagttatattggcaaactagagatattttatttgatgtgaggtctgtattcttgaggttgtgggtatttggttttgtgttaataatgtgttgtgtcctctacttcttggtgtatgtaagactctgtaaacctctaaacttcttttatactaggcgttgtttcagttagaccccacgtaattattgtattggccgatgttaatgtcaattggatcgtagaaagcgcagaaaattagactagaaccttacatttttcccttttacacttaccagatttagtttttcaattatctgaatccattgccagagtttgagtctaattttgatccttgtttaaagttttttttcaccgtgaatcgtgtgttgacaaatcacttagagaggtcttttaaaatactagttgttatagtcttatagacaacttcatttgataatgtgtgggtgtattgtcaggggaagataatttagcaaaatttaaattaaaacctattttcatattttgatactccgaaacaaaatatatgccactaacattagcaattccaatttgttgtccatagtacatttgagtggtagggttttggaggacaaagatagtggaaattttttcatttctactaaatgttatatgatttgataaatctttaaaaataaaaggaaatgatatatgggtataattttaatgctattatttttttttattcttataaatattgtattaatttctgaactttgaaacaaaaaattatcttttttttttctccacccataacttttctattatctttttgtttgatgttttagaagaagaaaatgttccattttgatcatttaattaatgaagcattaagtatttttttcactgttatattcttaacatttttatttttaaacggtttattttctacagaaatagctaaaattgtgaaatctcaattgtcccaagcatgctcttaagttttgtttggaaaaagtagttgaaacttaaaaattaattgatagatgaaagttgatagttaaaagttggtaaactaatttattaatagtcaaaagtctaacttctccgtcataatacccctaccgtcttccatcctctctcagactattttttcctctccatttttaattgtaatcaaattaattatgatacaaattaatatcataaattgaattgattattgttaataaaggtaattcatataattaatctggttatgctggtaacttgtatccaattaattcaattttaattaaaataaagatactaattactattaaaaaagataaattatatcacaattaatttgcttgctttaaaaaaggtaattgcatttaaaatcaatttaaaattcataaaaatttcacaattaaaacatatttttgttgtataaaaagaggtataaaaaaagtacaaaaacatgatttattaacaaaatacataatggaaacatgtttctgttgcgtattttttacactcccttttacacaatgaaaacatgattcagttgtattattttttgagtgaaaaaatacacaatggaattatgatttcgttgtgttatttgggggtaaaaaaaatgcataatgaaatcatgattttgttgtgttatttagggatgaaaatttatacaacggaatcatgtgttcgttgtacaaatatacaatgaaatcatgttttcattgtgctttgatttttaaccccatataagcaataaaatcacgatttccttgtgtttctatcaaaagaaaattttcaggatattgctaaaaggcacccacataggtagtgctaataataaaaatgtagtgtcaatagtaactctcttaaacaaaagatcataaagaataacacttatttattgctataaagttgaaaagtatcgacatgaagtaacctcgaaagagaaagatgaacgagcaaagtttgattaatgatatttttttcggtttgttttttagaattgccaacaatacccacttttttatccttgttgcttaaaatttattggaatttattaaattctgaaaaaaaaaatagtagtgagagtcactccattacatgaattttaattagataacatgttggtagtattttttagaatttttttttttttaaattgaagcacttgaatctccagagctcaagaagtctctcctctttgcttgttattgctccctcacaacagaaacactatgttcaaataagaacaatatttgttcccagattattgaaataatttttattattgtttaaggaaattattgaatgagcctagcaaaatttaaaatatataccaaaatattataattcctaaggtcatttattcaatttatttgcattgaaaagattaatttacaaacctaggtaaataaaatgtaaagaagtgctttgagtaattattactatttcttatatatgacaagttggagttgttaattttctaagagttagataatatccttatgtactttttctctcatgtattcatgtcataaattctttttttttgtttcaatttatgacataagttttctctgtttttccatattaaattaaactatttacaccttttcaattaattattcattaaaagaaaaaaattaatgcggatttttttaattaacataagacacaacgttatatttacatatcatcactaaaatatttcctttacaattattattttatttcaaattaaaagtttaaaatatctgcatcttttatatttaattatttttattaaactaaaataatattgatcaattacactattatttcagatcaaattatatccatttaactttaataactattatattatttttataatttaatataaaatatgatttttattgatccaattattgaattatatctatatattattaaaattgtatgtgtcaaattttattaaaattgatcaacaaaaacatattcttaagtgctttgagtaattttataattatttaaatttaaattttatatatatatataaaataatatttaaattacactattatttttaattttataattatttttattaaactaaaaaataatatttatcaattacactattattttcataaatatatatgaggagatcaaattatatccatttaactttaataactattatatcatttttgtaatttaatataaaatataatttttattgatccaattgttgaattatatctatatattattaaaattgtatgtgtcaaattttatcaaaattaaacaaaaaaacatatcatttttaaaaataatataataattataaaattataccgatataattttatcctctcattcatatatatataaaaaaaaaaaaaaaatatatatatacacacacacacacatgtatatcactcgtatttaaggacaccttgtgatgtatgaaggagatacttactagttgctaaaaatttgtggtgcataatatttgaatatcaattgggtagtatctcagttccataatatattgttatttttcgtgtctccattgtctattgcatttttattctttttttataagcaactacgatgccttaaaaaataccgaatgagttaagggatataacttatttggttgagtattttataaatctcttatagtgtcttcgacgatattttgaatgttgattgttttcatagctgttttttttttttttttttgttctgaggtggactttgattcacattcagtgtttgttatgtggaagcatgtcacgggcttcaaaatcctttgtggggcaagttaatcggcccacttagtttttcttttttctttttctttaagtaaagagcatataatgcgaatggaggccatgatgtgctgcggaccctgccagcggcaactcccctaatttgaaggtaagacaatactagagcaaacgaggtacatacatagttgagaaaaatgccccccaaccaagacgtggtccaaaccctaaacacttcctattaacaaattttgatacctaccctacctttgagttgcctctaatcacaattcttggtctttcagaacatgattcccatcaccaaatctattctttatttccttcttttgatttgggaaaatattagtgcatctaagcctagtcatgttatttacttatttaaaaagaaaatcgtagtcatccgagataatttcatatacaaatattaattaatgagcaattgagcatacaatcacacaacattaaacaaacggataaaaaaaaacatagcattaaacaagagaaatttgacagatatagcacaagttacttttctttttatggcttgagcgttacagaatgattttcaacccaaatttaaggagaattttttgtatgatttgggatcatcataggtcaattttcacacaaccaagattctcaattaaaaataataataaaacttgattatatgttttttttgtgagtcataagcttgattatatgtctcacataacattgggatgagaatggtccaaaatgatgtaataaattctcaattttaatggctggaggtgaaacaagttaataattaaagggagaagaacaatttgttgggaacttattactaagatctcaccaattgatgtttctctacaagaagttgtgtggcgttaatcaatcccatagagagagatatgacgtatgagtatgattactagacaaggaaataataagtggtaaggtgaggggcacctaggtggccatgcaggaatggttggttaggctgcaacattacattaggcctccattgaattctcaagggtcactttacacggtgagtgcgtgtttaagctggcgttgacttttcacaaatctctaacattgcaccttattttatgctatgcttgatgcttcttcaaaacaaaaacaagacacaacctaccatccccgcggcttctagaagtgtcacgttcatttcattaagtggggtaggaatatgcaaagaaacccctattttctctcttgccaaacaccccttcctacaacacatcacaacacaaggtggcctaatgcttcatcattcaaacttctaacaccgtattccactatccttttgataccaaggaagaacgaaaatattatatatttttcaactaaaaaaaaaaaaaaacatcatagtacctatgttttcttagccctattattttactcgtaacgttagattgggctctaaaacttaaccatatgcagggctagacaaaaacagaaacagaaacattaacggtgacatttagattgcattgattcttttcttacacaacctaaattactacgttacaagataccacaaaagaagaagaaaaaaagaaacgatttttctccagtccaaatccaatcattcacacctagatctaaataacccacgctgccaaacagcttgagtgccatcggaggcaaaatgatagtagtagttcttttcctgttgcaattgctcccaaaataagaaaaggtaaaaacaaataatcactccactcaccaaacaaagtttctttgaaagcgctcttgcttacacttggtcataaaggtaaggaagaaaataaaaataatcaaaactacaataaaaagccttttggtaccggaaaagctgcatttgctttgcctcatcatgtaacaatttacatgaaatcaatcaaattcaatttggcgttacattcaaacattggaaattcagctaatgaaggcaaaaagaaccaaaccaaaaaataacgaattgattttccaagtgtagagaaaaatagtaaagagaaataactaaatctaagtgttagagcaacactgaatttcttaactatgataaattgatgcatagaaacaaagagaagaggatcggagattacatacatacccacattggattacccacaaattcatcttgcttttcaaacaaccagatcataattactttctctttttttcttcccattcaatatttcctttcaaataaaatgatttaaaaaataaatagtaaaaagaagaaaataatatacccaacacggaatctgcctctcacagaattaagatcatattaccataatcttacatctgatcatcattttttaatatattttttttccgcatagcaataacaaaaaaatcaagttgaagagataaaaaaaaaatgagaaattaaaaatcatcatcgcacgataatcatcagagacaaagcgcggtgcagcgtagatcatcacccgcggcggcagcatcatcatcaaacggcagcgcgttgagatcgaacggcaagggaggtcgaaacgacgaggaaacgatgttgtcgtcaccgtcgtcaacgacggaggaggaagagtcgcagtcactgtggcagtcttcggggacaagagggggagtgcgcgggtatctccgcgtagtggtcaaaaacggcgacgtagtggttgtggtgggagggcggggcccactgaaggactcaacggtgctactcatgccacttgaagttggtctctgagggttgttaaggttgtcgttgtcgttgttgttttggtggtggtggtggtggtggaaaccagcgtagaagaaaggatcggtggtggggtgttgatagcaaaaaggtgagagagggaaattggttttggccttggaacctcggagagtccgagcggcggcgtcgtaggcacgtgcagcatcctcggcagaatcgaaggttcccaaccaaaccctggctttcttcaacgggtctctgatctccgccgcgaatctcccccacggtctcttcctcacgccccggtatcgaggctcctttaaaacggatccgttcacctcagccaccaccaacgccgccgccgaggctcctcctcctctgcccttccgcatctcttcggagaaataatgaaaccaaaaaaaaaaaaaaaaaaaaagacagacaccgaggttcgtccgacacgacaaggtgtggtcttggattggattggagctcagagagacatgtgtgtatgtatgtgtgagtgtgatatatattaatgggtttttttcacaagtgggtgttatggagatggaagaggtataataagatgatggggatgagaaatggagagagaaaggattgaaggcggtaccaccttctcttcttcttcttctgctccttcaactacacacactcaaatatattcttaataaataatacaaaaaatgggtcttcagcgtgttcgcgtttttcttctctcaatggctttcctgcctctgtctgtctctaatctaatgccatttttttattataaaaaaataacttttttattttaatttctttatggaaaaatatttgtcaacatctcaaatgctagttaacacggaagagaacgaaaaaaataaaaaatataatatgatgagagaaaaataaaaaatattgataaattgttcaaaattaggaggtgttcaaaaatagactctttctttgttgcctttctggctgccttccttctctaactgacctcttgtcttgctttatttatcccttgctttatctgctgttatattattttataaaaagaatctctgttttttatgtatttttctcgtttacaaattacgaagagtgagttaagggattctcgaaatgacgagaaggcccttgggtttcttggaagtaaatttgccttgccttggttggtgtacttttgatttggtgaggtccctttcatgatagcatacctctgattatttcttcttcttttttcttttttttttttttttcttttttctgggtgcacacacagagggaggggtaaacataaatgcaacagatgaagatcttatctctgttttaaattttaataaataaatatactaatttcctttctatgaagcaatggatttcgatcgatttcctataaagaaattagtttatacagtattttcttttcatctatttcaattatttcggctgtggacgaggaagcgaattatgtgccatgcgtaattgcaattttttatagccgcttaaatgtttgtttttatttttgtttttcataagaactttattaattactaattagcagtgtgaactaactatattttatctgtacgtattttttaacactgtatatacacgatcttaatttttacgaattatgattctacattattattattattattattattattattattattattattattattattatatgataaaggggaaaaaagtccaagcaaaaacaaacagtgagtttaaatagatattaatagcctccatcttagtttcaaaaacatgaacttcaattttaagacttctcaattaagcgatacaaatcttttagtttaggatattttaaaaattataaaaatgcttacgttaatccataattgtcaatgcggttaagtagctcacttactctttttttgtacaagaagtatctcacttacttaaaaatacatattccacataattaatacttaatgtcgtagtttcattttttgctaaaaatcagaagaataaacaatgtcaatttattgtcctcggccaaatacttatcttttttccttgtatctttccatatgacttttatttattaataattagtggtgtgaattattcaacgaaaaaaagtggtgtgaactaactttcttttagaataatcaaagatgtaattactcaagtgaactatgcatttttcaataagcacacgcaaagtaaaaaatacacaaatgatctcatctgtatgtttatatgttaaaacctaataactaaatacattttccttccactaaatcactagattttgattttggagagattttaggccaattctaataatgatccataaattttattttctaaaaggaaattagtttatttttttctttttgttcattttaattatttaggctgagaggccataagttggatgtgctgtgcacaagtgccattcacatttagccaaatattaatcctttctgtttgtaattttttataggaactttgataattactaatttgtagttagaactaactttttattgatataagcgatggtgcaattacttatgtgaattgtacttattttcagacgcaaagtcggaaacacatggatgttcctatctgtaagttaaatcctaatgaataaataccatttccttcatctaaaagaaatagattttaattttcgagatattttactccaatttctaataattatccataaactttcttctttttatttgcaatttttattagaaaaattattaattactattttttttaaaatgattggtgttgtaacaacatatgtgaagtatatctattttcggtgggcacatgcaaaatggtaatacacaaattaatgatcttatatgtatcataataaataaatataatcttcttcctctaaagcaattgattttgattttgaagaaattttatgccaaattctattaataatctgtaaatattaaattagattttgggtttaattttaaaaatcaatttaattcgataaaaattaaggttatatgcatataaataatttcagttagaaaattgccatgtctttcttatatttctacaaatatgagttttaagttacaatttacatgatttatattttctacaatgttgttctttaaataatatcctattatttcgatatatttatgattttttccacgtattttcttgaaaaatcgattccctaattttcaagaatcaagtactttcttgccgttttacataacatgaaccaaacaaccccttaaaaccaaagaaaataaaagagctaggggggaggacacacaagatatacaaccactgcatcataattcatatgattgagggtaaatacgaatatagtatcataatgagcacattataaagaaaaagcgaattggtatattagtgattattacgatagtgaatatactttaatagtttttttttttaccaatactttaatatttggcaattgtttaaaaacattgacatcgcaaaagaaattttgatatcaacaatactactttaatatcaacatcatatctaatttaagttaattaaaatcgatattagataaatctaataataaataaaagaagattaaaaaaagtggaaaaaaagaagataaagaaaaaaataactaaaaaatatcatataaaatataaaaataataactgatataaagttacatcaaatttataattttttttcttttttattctaaaatacaggccactaatctatatcttgttaattgattggacatgatagtatagtttttaaataataaaatgaaaataaatagtcttgttagatgagacatgtgttgaatttgtatgtatggaaaattaaatcgtactcaaagtcgttttgaaaaataatgtgaattcattttatatgcatctatactcagaagaaaatatcactgaaattctcgacaaaataatgtttcaaatatcatcaactacattttctccccctgtcgaggcttacgtatgaaagaaaaggagttttttttttttttttttttttctgggtaagaaattcaccagactggattttactgaacaattggtacgtttagcatttcttccccttcttcagctttctttttaaagtaaacagaactaaagcatctaccatttcagatagacggtgcaattgtccaaggcacgataaaaaaagatacaactattcagaagcacagtaacatgcctgctagtttaaaatgctttaatttaatttcgaactatttttcatcacatgcatcagtacgtagggtaaaggaaatttaaatatatttttttaaaaaatttaattagtaaaaaagaaatataaataaataaagagacattaaaagacattaaaaaatggattacaataagatagtagtgaagaaaaaaataaattacgaagttataacctcaaacgctatatgaaatactactaaaacaatatagaccattcaaataaactcttttatcaaacatactaatttaacaaactgtttttttaataaaataaactagaaagttatttaatctcctcaaatattgagctagtttaaatttttttttctaaaataagtatgttttcaaataaaataaatagttttgtattttctgatgtgtttgtctaaaatatttttatttaaataaatattttttagaaatacaacatatttgtttcttaaaaaatacttataaaaaaaatatttaaaattactttttaaagtttaaacaaactatcatactattttactccttcttctacataatatatatatatatatataaattgatcaataaactattttagatttatattcctttgatattttcgattggacgacgactttcacagttttactaattattgaatttcgaccagtttcctaaaattactagtcaggtatccgttacacatcatccaacccttgacccttaagtaagacatagtctacgatacgaaaccaaaacatgtctcgtacagtgcgtgagtaattttggccattggatcgattttaattttcttcaaacgattattattttctatttttattatttatctttctttgattagcttccctttctaccatttttcttttctctctctcttctctctccgcattcccgtctccacgttccaccccattctcgtcgccctatgtcaccatcgaccatgacgacaccaacacgtttgagctcttctacgacgacggcaatggcaccggctcacaatgatgcaagatatcgtgaagatgatgcaagatatccatagagattttcttctcttgctcacgatgggaggtgcacggtgcacctggatttttctgggagggcaacgcggtggctaggagagggaggggaggcgacaaaggaagatgaagggatggaagtggaactgggtcggagagtgaagggaggaagaaggacaaattggtatatgactgaaaaaaaaagtaaagaaaaaagtaaaataaaataaaaaataacacgatccaacagatgtaattactctggcacgatatgagacatgttttggtctcgtactgtagactccaacattaagttttctccaacattaagtaaacttaaccacttacacaagtcatttcacaaaatctcgatacacacaatagtaaaatcatgataaaatagaccctcttaaaattatcaagtcgataattacaacataatcctgtatgtatttctacatttgacatagaagattaaactttcacactttaatactctttaactatatctcattacatttttacatttgacatagaagattaaactttcacactttaatacatttgaagaatatattgattgattaagatccatggtcaactagtgatatatcaaaataatctatgatttctctttctctctctaactgtttatcaaaatatattttacagtaataaaatgaaatacacgttacatcatatgttcagtaaatatatgatgttataataagagttgttctattctatacctttaaaaaaaaaacaaaatgaatatattttataaagttccatttcataccatcttattttaaacgtaatgtcatttaaatatattttagaaattgaaaatttcaaaataaatacacttgtgatccaacatttattactgaatgaatttcacgtggttctattcatagagtaaaattcaatagataattaaatatagtatcaacatatttcccgcactgtttttgaattttgttacatattactgcacaagatggaaaaggtgataagattaacgattgtaaattgcaagatgtgaggacagagagaagtagaaaaaggaaaaggaaaggaaaggaaaggagtaggaactaggaagcaaagacaaagagagttagatagataggttaaagagttgtggggactcctctggaaatttgggttgcaattggccaaggcaacgcatgtttttttttttttcctctcttaatttttattttcttgcgaaacgcgcacgccagttgcagcagctcgctcgggaaacgcattcattcatcgaatcatggccaagtcaagtccaatcctttgctctctttcacaggcttttgtcttttccatatggtttaattattcatttcatttttaaattatttttaatgatttaatttaatctttaattttgtaaaaaattgaaaattaaattaattaatttttaaaaatttaaagattaaattaaatatttaaaatttaaaattaattaaattatttaaaataatttagacactaaattaataataaactctttcttttatttgttgttttggttttggtggactcgtgcgcgcgcgggaaaatgatagacccgcgcattttgttggttacgcaacaacaacaacaacaacattttcatttcgtgcttatccagaatacaatacattggctttgggtgggtgtggtcggttacgcttttattattgtttctttcaacgcaccaacacctactaataataatatcatatgctcacaccaccccaacttcttcatccaatcatctctcaccttcgacttgcttatttaaatctaactaattagattaccctaaactttcaattagtttaataaagttccagaattagctttattaaatactactaacagatgcaaaaactcattattcacggaaacggaattaaaccttttttattttttattttttggaaggcaaagagtccaaacccaaactaaaaactacacacaaataacacgggggagtctggtctcccaaaatatcagaaactaaaagctgcctaatttgaacatggggatgcacagcacatgtcataatagactaaaccctgccctaatgaatgtgtctcccgtttttaaagtaaaaagtattttttttttttaattctggtaataaacattgacgttgttgacaagtttttatttatttttttttttttataaaaaaaatatttaatctctcatttaaccccttttcgtttatattgtctgttaaatatttatgtgactctgaaaaataaaaataagagataagataaaaggtcataatattttttagaaactaaaacaaatatcaatacttgtccggaaaaatagtgaaagactaataaataggattatatgaaaaaatttaaaattcgaaaactaataatgattttttataaataaagatagaatataaaaatggcaatatgttataatttgaaagatgtaatttagcataaaataagtatctttatgttgtaccattcgtaagttccttagcaaaaaagaaaaatgaatggacactgggctacaaaatgtacctcttcggtcttctgcgtttgcgtgagtgcaatttttcattgattattcggtatgatttgggaaatacccacgttaaatagataatatgcgccttattaataaaaaaatatagaatgtctgttgatttaagagttcgattccccatatttgtgtgaatgtaaaaatattcattgaaaaaatgtagtatttcaaaagatggtttaaatatgcctttaatttctgctatatattgtttctttgtttgatcattgtagtattattattgatttttttggtagaaaataaaataatatttgttatttttaattagttcttttggaataaaatgataaggactaaaagcaaattaatcacatatcacaataacaagcaccaaaataaagaagagaaatcttacattgattatttttaaaaaaaattataaggacaaaaaaaaacaatcaatgtattatagaaataaaaaatatatttaagtctccaaagaataattttaactctgaccggaaaatatacatagtctataaaaagttcatatattgctattacttgttttttttccttctttggtgtatacatatgatgaaattttattaagaataaaacttggattattttgtgtatggtagaaaatatatatgaagacactaaagttaaatatttatgttaattcgttgcattgaaaaagaagtttatagaattaatttttaataatcttaggtattttcaatcttttggtctaaattttatgttctaataaaattaactattcatgtttatttttttatattttttattttatctaaattttaaaatacacacttaatttataataatatatttcccaatttcttgaacacatttagttggcaaccatttattttaacagaaattataagatataatattactaaaaaaataaaatgttttttaatattatgtgaaactgggcctgggcccgttaacagttttggttgaatataacatggcgactaaagaaagtccagcatcacatgaaacgaacaaaaattggcacaaataagatttgggccgatttctctaaaatgttgacgggtagctccttcctaatcggctcattagaatgacaataaaactgcttgagataaaaatttgacaaaacaagaaggaaatacaatgtaatagacttgacataagcagaagaaagcaacaatatcaacaataacccttaaccaagtcactgttgtcctaaacaaatttaagatagaaacacaaagtcattgagtacgttttgcaacattaccaccctttggtctcaaggctattgtgtgtggaccctcttaaattataggtcgaacacttacccaacttcacatttaaaaaacaaataagcaaacctttttcgccctctaggcttgggactaaagagttgtgaaggcttatagattgagtacttactccgtcggtaattataatgggttgagttcatgaggaacagtgaccaaagtactattgttcccaaaaaaattaaccagaatgccacgcgaacaatattaatacccaaagtaccacgcatcctaattcgcaatgcgtcccagcaaattccgtcagttgatgtggtgtcaatctatgaatctagtggccacgtatttcgctacaggtgccagcgaaatacgtagtcaaactgtaaatgaacgtggtatagcgaaatactattactatatattatatttattaactatgatatataattaattttaatactattactatatattatatttattaaataaaatatttttattgaatttaataaatataatgctcacacacatatattttgaccgtacaaatttctaaatgaatctataattaaaattttatgataaatattctttaacaatgttaagttaaatagattaaattctgaaaccaaaaaaagttaaatagattaaattatgtatttcaacataaggaaaaggcactataatattcctatatctcaagagttatattacgatattaaatttttataataacattgtcatttttaattaaatatgtctatcatgtatcctataacttaataatcctaaaataacactaaatatcttctaacctaatgttttaaatctcaaagactcaaacctaaatattatttaacaactaaaactatataaataatatattacaaaaataaaaatacataacactaaattacaaaaaataaaaaacagaaaaatactaaaaaaagaacttacctttcacgctggggagagtgagggaaagtagagaggttatatagtggggaggaggagaggtttatatagtgggccacataggtgtaattcgcttgggcacgaattcgtccatgtctatcacgtgttaccaatgacttttttttattgttgtgtcacgtattttgtgggccaaatgaattatgtagtgttgttatgtgtcctacctgtttatgctcggccaataaattgacgttacattagctgacgaaattcgcttagatgtattctgaattagaatgcgtgacattacgagaattaatacttttgcgcgacattttgattaatattttgggaacagtggcactctgttcacagttcatgaccactagacaccaatagtggaacataaacaacttgagaaagggtaaaaaaatttgtcgattaacccttagtaaatacaatgtatttcgttgaatgattgacattacatctgactctctcaccagaattcctgcataacacacctatggtttgcagtggccggaaaactaaataaattatttcactgaaataagtcaaattaaatattcactaatttattatagattatagtgtcctttgatagtttttcttttcgaaattggcatcaccactcatggtcgagtcagagtggctgatgaaagctttcgtcctttgatagtattttctccccctttttttttatagagaaatcgacggcatcacacgcatggtggccggtggccggtgggtatgcaccaagtggggtttttcttcttcttcgtctctctctctctctctctctctctctctctctatatatatatatatatatatatttaatatcattataattaacatatgctctttcaaagccaacgtatcaatttgtttctatatagtcattattttttgtttatgctaacaatttagggagcttattagttattagcctccgttttacgtacggtgtagtctaataaaagtttgtagggtagcactcgtttaaataaataaaaactatgatagacattccaaagaagcttgcattgcttgctataataacttgcacatcaagaagttataattgctttaaaagagtagaagaaatggatccttcaaagaaacgtaaagtagaaacacaagttaaaaaaaaatgtaaactatatttttcttcattgaaaaaatagagataattacaaataaatgagtaaaagaaatcaataaccccccaaagtaatcatcataatgatttattacaaacagtaacgctaacgcaaatttctccaagcctaaacacgtgctaccaatggaaaagctcataaaaactccggcgaaatccagttaaatccaaatcaaggcttcaccaaaaacactccatctccgtcatttcagtgtcctgtgggaaattcgcaattaccatactctgcaacacaaattcaaaaacacggtttcaacacaaattaaacaaaaaaaaaaaaaaaattaaaatctaaactcatgcataatgcttttaatgcaatgacatggacaaaataaccgttctatgtcgaccatatagggccgagcaatcaatattcaataataaaccctcaatttcaaccttatcaagtatcaactgatagggccatagggcgaaataaacaaataaaacataacatttcttgcccgtagttggtacttattattaatgcatgtttatttaatttattttgatcaggggaaaataggcattttgtgtctcacggcgttttcaagttttttttttttaaaaagatagataataaaagttaggagatagtctgtaaagaagattataaagtaaaataataacacacagatataattatagggataaaaatgagtataaaaataaaaatataactaagtgattatagcagcagtacttactgggaggctgagtgacgacataagcagtgccatcaaaataacacgtgccggatgcacgtgcctttttctgatagtaactgttgaaagcgtaggaagcatgtgcctccaaggtgttaggatcgtaacacgtggcaccaggctgaatgggagtgcaatcagccccaccctctccgcaagcgtaattaagagcgttctgcagcttgttctccgaagaaccgccattcgccacgcaccacgtctggcccttagacgacgtcgtcacgtcaccgttcaccggaacctggctctttccaaccccggacggcggcgcctccgccgtaagtggaatatcataaaccttgttctcacttggataaaacaacccgtagttcctctccgacgtgggacccgttttctggttctcattgaaaagcgcgaagaggaaaacgtcgagtgactcattgggcttcaagggggtcccactcccactcaacacgcgcttaaccaagtttccgttatacgacgccgcattgtccgggctggctccgatttcattagagtccccagcagaaggccaacccgtttccgaaacggcaatcttaacgtcgtcgtatttgagtgctgacaaggcagcaaaaacggcgtcgatttgagcgtcgaacaagttggtgtattttaaaccattacccgaatcaaccacgccagggttttccttgaacagcgcgtagtctaaagagattttatcagagtttgcagcgtaagcgaagaacggataggcattcaccattaggtaagaaccggtttggcggagcaagtcgagcatgggtttgataaccggttcgagaagttcggttttgaaggaaccggatgaggcggggaacgagttttggagcgcggagagtgcgatgggtgaggagattttaatgtttttgtcgaggttgtatttgactagagaagcgtgaacgttcttcatggcgggtacgaggaactttgtcgtgttgtttgggtccacgaacacttcgtttcccacggctatggcttcgatttgcgtggcggggtagtagctggagatgttggcttggacccacgcgtcggtgaaggactgttccgcggcggctttggcgagaagctcatttggcatggcaacaacaaccttcattcctgagttggcaaacgcggttaagacggtggcgtcggtgtcgtagagcttcacacggttcagcccctgagtcttcagaagctccaccactttcgccggtgtaggtaggtcgttcgcaattcttccatagtttattccgattgatcccgcttctgcaaagcacgtcagaaagttaacaactttcaaatgcaaaatgaaatgaagcaacaaaatatacatgcagtttcataagtgctattttctaattacaaccagagttcatcttggtaagacgaaattctaatacaaactgaaagaagagtagtgagagatgtatttacctgatgatgaagaaaagaatgagataaggatgaagaagaaggagaatgtgagaggagccatgctctgtttgagagagaagcagagcatgcagataattagagaggaattaagaaaaagaaagggtgcagttattttgtttgtgagaagagagggtgtggaattttatagagtgattggggacttagtgggccaacgtggttgaaggaaaagagctttcactttacaccgtgtgggacccttgacctgtgttggagacccaaccaccaatgcactatctcagagccgctaatgttaggttagaaaaaatgttactacttgcggaagacaaatgtttttttttttttttttttttcctgtatagaaaaaaaaagagttagaaaatgttagctgaactgtccgttggatcatgtagtaggctatgttattgaccgtacacgtgcagcgtatcgtttgggacaacgttgtcgacagggacacgtctcgaatggaacggggtgaggtcgcgattgccaagggacatgtttggttctatagccgagaaaatatattattattggcttgattttcgattgaaacaatgatgaatttacggaaacagggccaaggtttcaatgattttgctcaaatttgaacgttggactttgccatccagccgtgcttgatttgatgacatgtgcattctctctgtttttgtttcttctgggtaaaaagaaataaattgggtgggaatcaattaattcaggactatatatataataattcatcaattctctcggcaaatgaataatactataataggcatcatcatcatgacagagtaatactattattttatgattttatcatttgctatgggattttactttacttcagggttacattcatttcttgctgtagatttagagatctccaaatcaaagtttgttgaatgatttttaaacgaagaaatcggtttttataaattttttattggagtaaatttatgtaatatgattttaaaaaaataagatctgtatttttataagaaatcatttcttaacaataaaaatactaatatttatctaatacatatcagggattattccaaaactactttgttagttgtaacttattttaaaatatgtaattgttatttaaaattaaaataaattgtcgtaatagtttatataattaaggataaaaatatctaaaaaaatgagattatttattttataatgcttatagataatgagtttaagtagttattataaaagttttaaagaaatcacaccgtgaatatgcattcaaattaaattaaattaatatttaattataatcaaggggaaaaacatgcatgtttagttttaggttagaaaattaactgtagttctaaaattgattttagataaattttcatatatttaatttttttataaaaaaattgaaattaaatttaagttctaaattgattatgagttgaaataattttgaataatttttgttttagataaaaattataatatattttatttttaatttgattttatagtaaaagtattcaaatataaataaaatttaaaaaataatttccaaaataaatttgataaaatgatttgtattcaaaattagttttaatctgtcaccgtgtatccaaataggtacgtaattccttaattaaacaaatggtgtagatcagatcaaatgaagttaaatctaaaaccaatgaaaactacaagacttgtagaacatttgaagaggacaaactagagtctgtttgaatataagattaaaagtattttttgaagtttttctactgaaaaattactatattttaaaaaaaaattctcaaaagtaattatggtatgtatctaaatatgcccgtaatgatgaagacttgacaaaggagaaatgcagcaggatcgatcaataatcattctcctcgtttggcaacgggaaatgttggtaattgatctgtgtgtttccttctgatttcattcatcccaccacggaatggtatagccattaattaattcgaaatgatagggattttatcttagtcaaaatctcaaaaggccgtgaaagacactactacaccatcgtgtggaaattccatctttttccccacgagtttcatagaaattttacttgaggaggataataactaattccttgagctaagcaataaaaaggatttctatacattttcttattagttattattattaatgtgatttctatcttatatatttggtggatagttaaagaattaaaagtacagaaaaaaaatcataatgtcaacaacaaataaattattccataattttttttattgtttaacttgttaatctatgtactacatatatagccagtacagagatattagagtaagatttttcttatgtcgaatacattatcagagttttttagacaaatgacatgccaaaattcaatctatgtactacatatatagccagtacagagatattagagtaaaaaaaaattatatatataccattaattttgtttatttcatgtgttgtcaaattaattaaattgtataataaaatatattaaatgataggataaagttttttagacaaatgacatgccaaaattcaatttttgtcctttgattatgatatgtatttcaggattactaacatttaatttagtgaccctatgaaaaagaaaatgagtaaattttcaagtgaatgcacctttaaatagctagtgaccgataaattaaccctaaaataacgactttttttttgtgcagcctgaaataatgacttttgggtagggtgtaattggtatcggcttaatttggccccaataaataaatttacatattttagtattaaaataatatcatttgatggttaaattattgtactgatcatttaaaagtcagatgattatttttaaaaataagaatctttaaaaaactaaacagagattgatgctatcgtcattgatcaaatcctcatccaaacgtatcctaaaatagcaacatatacaaccaaaaactcaagttgctccgttatttttacttagtttgtcctaaatgtcatattttcaaagggttttcatttaacattattttagtctacataatcaaaactgccaaatgattgtcacaccctatatccctataaacaaaaagaacaacactaggaaataataattaatgttaaaatattttatatttatccatttttatcatcttaattaattataactaaatttatttcatttgtcatactaccgtatggacaaggtttgagaaacaaatgagaaaagataaaatgacgtgccattagcaagaagaagaaaaaaaaacagaagaagaatgacgtgcgattaatactttttatacagaaaaaattattgtgccgtagattagtcggtgaaatgccccatttttccatgctaacacaaacagccaactagctttgcaattatgaatgatgcaatcaaatacgtatgggggaccttttgctaattgaaaatgcttgcggacgaaggtagtagtaattaatactttggtgccaattaataaaacatcaattttagtacttgttttctgcagccattttatccttcaataatattattaaccataaagaaaattaacaataatggcagccattgaatttatttatcgttgaattaaccaaaggaagtggtcggagttggagggcattttctttctttcttttggttcaactctcaacgccacacatagggcgttggcatgcacaaaaatgaagatcaatttgaaggtcccatttcaggtcgtcacagtcatgtcattattcaaattcaaattaagtaaaagggacttgttacagaaaaaaattgttagatgaaagatatatttttatttggcacatgtattgaattaatttaattaatgatcagcttataaattttaaaagatatatattatcgaatggtagttatcaacaaatcattagctgtatattttgcacactaaatgaaccttttattttaatcaagtcaaaattggtttgtcaacttgcatctttccaatttcacacaggtatcgtttactttaaaaatcttaataataaatagggagctaagacgtttctacacttaaactctcaggtgtactaaaatatgataggcgatttggattcgtaccctcattaggtcggtaagactcattcatatatatttcataattcatagttcatagtgttcaatttcttaataactagtgttacattagatataattgcatctggtacacttggttgtccaagctaccagtctaccacgatatgtgatggagaataacattaacaagaagtaatacaaataaaataattagtagtttatgtttgtcatcttaagtttttttttttccttctaaaaattcattttcaacaaaagtagaaataaagaataaattaatagatcattcatgctaagcttagacgatctgtaaattcttcaattaaaactggagattttaggtgaattcatccctaaaactatacataagcttatatgggcaatttttaatgtctttatgatggaggttcactctacggttttctggttggttcacttggacaccaattttagcttgctagggtttgattggggcactgtggtggggatgaagatttttttttttttttttggagggagaggcttttgtccaaccatttgaggagggagcattttattgttcgataaggacaaggagatctcaattgatggattgggtggaagtgggacatgcatatatcataatgtagacgttatgtttcatatttatccttgtttctagccaccccaacagaaaaaattggatttatcttttccatggcttcaggcataaaactgtatttgtaaacctaagtaactcgttcaccaagaacataaacgatagaactcatctttagctgtgaaatatttggttagaaaaaacagatatataacttttcaaactaaaaccaaaagttagtttagaaagaattaacttcagggaacaaattatggcaatatattgaactagaggattaaacataaacctatcaatatatttaaaacaatctcatactgtgctataaaatcttaatctttattattttcattctttgatccccctccctacctcctcccccctccccccccccccccccccccggcaaaaaaaaaataaaaatcccgaaccttttacttatcttcccttaaaataatatatacagtgtaaattttgggtcatccaaattcctggcattgaattcaatcttcattgtgctggagtgagaaatagatgtaaatcttaatgggaaagcattcaaacgcataggattttgtatttatgattttttatacccgaattagaccaagaagccataatcatgtaaatcataatgtggaagccgtgaaacagagaatcgtgaaagtcatgattgtccatatcctgattaaataaaatcataagcgtcaagaacgtctttgagtataattgatgaattggtttttcttccatctcactctttttgacacacatagtacggaagatttttaagagcacaagtggaaaaacttaacgtgtgttttaagggagagaaccaataatacgttcctcaagtattagaaccaatggatgaagtcaatttaatctttaaaaaaaattcgatacaatttaatttaaattttaaatagtgaacaaatacctcaatcttatcagtttaggtcactgaaggaaacttacaaagccataactttccaataaaggattgtgttacttgtgaaaggccagacttatttcaagtttctcttttaattcctgtatctttcgggtgcagctcttttcattttttttggtccacggatgattttttgtttttggtcattatcagtgtctctcttagttcatgttatgaaatcgatttcattagggctattacatcttgcagtcccactattatatcatatacctcgtgttgcattctgaaaaagaatgtaaatgaccattttgaaatagtcttttcagaacataatagaaggtacaagatataatagtgaaagttagagtataagaaataaatgccgataatgacccaataaataaaactgttattcgggtaggcctctagaattatgattgggagttgatattcagaccctttttctgctcttcgcaccagctcctttttttgtattttttattattactaggagaaaacaggcaaactgtttttccattttctttgaataaaaagaaagataataaaagttagtgagtgatttgtgaatatgattatagagataaaacaataatttattattgtagttattaaaatgggtatacaaatttatatactaaagtaccctatttcctttatatatagttatagattatagatatattaaggaatattattcttgtttaaaagatattatttgtttcttatgtaagaacaaagtattttaccctttaaatattgcgttgtgatctcaggtttgccaatcttgtcccacttacccctttgcacttattagtgtttctaagattcttaagcagatgattagatcaatgtttttaaatgttgttcatccagggtgccctatgataatttcgtccagaactgccctttcaaacgtcaactccaatttacagaataagggcaaataaattttcgaatgttactccttggtttctcacggttcagtacaggtgaaagaaagttttccacatcagtcaaaaggatactcacattagcttatttatcataagcaaaagcgttaaaattgaataatttcagtttcaccacatacacaacacacgtacaacagaggcagtttcaaacccaataaagagcaatgcacttgctggctctttgtcaaaaggagtgcataagagaatgcacaggtgacatgtatagcattcagagtttgcttcctgcaccctcttgcattaccaagcaaaaatatgaaggtgcaagaagtttcactcttagatccaaatggaaagtggatagcgggcttagctttggacttatggtccatcaggaagacgggcatgtcccaataacacgattattaatgtaagttggtcttccataaaaaggctcctactatttacacccacgttttctaacaaataggataaaaataagactaacaaatatgagtataatataaatatttatcatttatttatttatttattgtaaatcagcttaattcttaagtgatattttattaaaaaatatatacttattctggaagtatatctttataactatgaatcattgttagggaaatacatttacggaatgtgtatatgtaattttggaaagacatttttggaaaataaaaggggtatacttctttttataatgagtaattgagaggtaggaagggggtgtctggggtgtaaatagcaagagcctaaaaaaattgtgagttgagtttagcatcctaacgtataatgtagaagattcacaaatatattttatccaaataatttgtcctattcacatttgacgaattgaagttattattatttttatctcataaagacattaaatggttgaatagcttttgaagcagcacggatccaaaaaaaaatcagctgtagaaatattattcacatatataattaactaggaacgattttcatattatagttttttttcactacatttcaaattatgaaagcattttgtaactatacatacattgagaaaaaaatctggtggtgcagttgggcctaaattgaatccgtccctgtttttaggttataatatattacataccattcaatcaagttgagtataattattgcctagacttagcaagcttacccaaaactatattaaaatggttgaatagcaagtgagtataaaataggcattagggtaaaatttaacgatatatcattagcacaatatcatgtatattaaaaaggattactgtgggaaaaaaaatcctattttgaatgactaggcaataatgtaaatatttatgattcaaaaataaattttaaagaaataagaaatattcacatctaaattacttttttctttctttctgaattcacacctaaaatacttaaacacgacaatagtactattttcccttcttttcttttcttttcatttccggctaattaaactagttttttttttttaatagagagattcctctagttacatatgagattatatatacaatgtattttctctatttcaaattgattaacgtttacattttttcccacataatttaggaaaatacgtaaccatttgtgtaaggcaacatattaacaaaatttgttaaatatttaattgaagatcgataaaaagaggcttttcctatttacccccgactaaaagtaaccaccctaaacaacaccagacttagtagctaaaactatcacttgcacttaaccccaaattacctaaataagagtaatatccaaacttaactaataggataccctattacatctggtcacgtgatcttacacgtggaatccaacaaacccaactgtctttctcgctgaatatgcctatataggtgagtttttcttaggcatgaataacttcactcattcattactctcatagacattttgatttgatcgtgagaatctctatgagtaacactaccaaagtcactcatcaccatcatgaattattgtgccattgccctgattcatatccacatcacaacaataataaaattgcacaattataatattagagaatacgatttatattgaaaccttaaaagatcaaaatgcaccattataatacctaagataggaaaagtctaattaagctaaacataaatagaaagtttaaccaaagggaaaaagaattaatcaaccggaccgagggtttggaaaagtgaaatttggtattgtttttgtaatgaggcattcacatgaataaagttaccttccatgaatttgcttacatacacaggtagttcagttctttcgttattgtaatgtgaggcattcgcatgaataaagttaccaaccatatttttgctcacatacacaaaggcattaaaaaacaagacacatccagagatttttacatacacaaagacattaaaagacaatacacatggcacataccgttatgctagcatccaagtgagaattgattgaattcctgaaaaataccttttcaaacatctcgggctccattctatacattagcaaggctaagaataataagtttccttaccgttccaaattgaaatgtataataaagccgttcaattacacagaaaattcacccctatcatgtttctcacgcgcccagcttgattaaaaaatatattttctttacattctattctattaagctgtttgaatttgtttacaaacaaaacaaacgagagaccaaatgcactagccaagaccctacgaaaacgacaccgtaaatcgtaaccccataacactagacacagcatatataaagagaaacaaagatatagcatatgggggagagagagagagagagagagagagagagagagagagagagagaaatgaagaaaggcaatgttcaaaagaacaatatacggtgttcgacactatacattgctttactctctctcatcacaatcttcattattcccttttgtgagtccttcaactatggccaagccctgtcccagagcctcctctatttcgagtcacagcgttcaggtcgcttaccctacaatcaaagggtcacttggcgtcaccattctgccctcactgatggcctagaacaaggggtacatacattacttcatattaatatattaaccttaaactatgttattttccttttgtgctagcttttcattcattctaatattatggttattgtttttttgggcacgtaggtggacttggtgggagggtactatgatgcaggggacaatgtgaaatttgggttgccaatggctttcaccataacactcctctcatggggtgctatagaatacggcgaacaaatcgctgctgccggcgagtatgctcacgctctggagactatcaagtggggaaccgattatttcatcaaggcacacacacaaccaaatgttctttgggttcaggtattaatttcaattccagtgaatttttttttttttttttgaaaattgattacccacgcgccgccgttgaaaatgggatgaatgattacttcttccaagctaaccggaggaatagatttaaatgtcggagctgtcaacggattcgtccgcaatctcgccgtgactggcgcgcgttatcactcgcagcttggcatgaacacagaattttgtaaatgagatttgttaaattagagtatctaaaaggaaaattattatgtaaaatccggtcgtctaatttcaattaatcatgggatatgttatgaatttttttaataaattaagaaatgtaactatttatacttattacataaagattattcgacacccaacgtccaattaaaaaacataaagatttgtcggagattataatatcttaaatcatatagtaacaattatttttaatatattaattagaaattgtgttactatataaatgcaaataatgagtaatgatatacatatacttatttattttaaatattttatccaacatttcttaattctttctttatatcaatcaaattataaattctttcatacttataattttttctttttttcaactctacctatctctaggtgtaagataacatgtttatcaaacattgtccgcaaataatatatttttaatactgtacgttatagatttcactagtttaggattcagacttgcaaaaatgacaacaacatatttagcgaaagatacagaaatttcactcaataaaaaagtaaaaaagaagtgtgctacggtaatgaaatgatgaagatgttaaattcctttataaaagtggttatatgtgtatatttggtcttatgagttaaaatgttcaggcgggtgacggcgacactgatcactactgttggcagcggccggaggacatgacgacatcacggcgagcttataaggttgacgccaacaaccctggctcggatgttgccggcgagacggcggcagcattggcagcggcatccattttgtttaggagaacaaacccacattactctcaactacttttgcatcatgcacaacaggtatatgagttagttttattgacaatgttacgtagttatggattaatttaattaggattaatttcaatgggttgttgtgttattgtagttgtttgagtttggtgacaagtacaagggccagtatgatgagagtgttggagtggctaaagggtattatgcttcggttagtggctacatggatgagttgctgtgggcagcagtttggctatatagggccacccaaaaggaggaatatttaacctattttttggagaaggcttatgactttggtgggaccacttgggccatgactgaattcagctgggacgttaagtacgctggtgttcaagccattgcttccatggtaattccctcacacttcccaattcaaagagtcacttcccttctttattgtaaattgtcaaaaaaggtgcattagaagtactatactcactttgaaaagaaaaaaaaaaaaactaaaaagcactatactgccagtattattggaccttagttacatattatggatcatcattgatttctttatacatatagagagaggagtgacactctttctcacacttttttttttatatatttgttttataattagttaaaatttatcaatttttacaagttttatttctcatctaatataaattaggagagaaaaatatcaattaaaaataaatactattaaaattaattatttcaaaaaattttaatcaataaatattaaaaaaagaatattaaaaaatgtcattagcatttctctctctctctctctatatatatattttcttcagggtctagcattagcatagttggattcaatttacacgagaataaatttttaaaatatctttagtgatagatttcaaattgaaatattatatcactttttgtagttttcttaaaatcacataattttttttttagtattagatctcattttgagatcttaagaaaagagaaataaaaaatttcttcacatattgagggttcttctataagaactcattctttatgttaaatatctcttcaactcctttatcagaatatctagtgaatatcagatattaagttcaaaatctttattcaagatctatcactaaaaataaattttaataaattataaaaaaatgtttaaaagagtacaagaaagaatgtccctgtcattcatgtaccgtaaattgcttaccgacatttttccttttaacagttccttatggaagaaaagaagcacaagaaacacgaagtcatactcaaacagtatcgttcaaaagccgagcactacctatgcgcgtgtctgaacctcaacagcgttaataacgtggagcgcaccccaggagggttactatacatccgccaatggaacaacatgcaatacgtagcaacggcgtcgtttcttctcacggtttattctgatcaactcctagccactgatcagaagctgcattgccaaaaaggggaggtgggtccccatgagatgttggccttggcaaaatcacaggttgattatattttgggctctaatccaatggctatgagttacttggtaggctacggtccaaaattcccgcggagggtgcaccataggggcgcatccattgaatcatatggggaaaataagggttttattgggtgcactcagggttatgataattggtatggacgtgttgaacccaatccaaatgtactcattggggcactcgttggtgggcctgatatcaaagaccaatttaaagatgagagacgaaattacgttcaaacagaggcttgtacctacaatactgcagcactagtaggggtttttgctagattgcatcaatcacatgcacatgctgatgtttattacaatgaaacccctttggtagcttctagctaattggggttatagagaattttttttggtccattattccgggcaaagaatatttcttaacagtgcttacttaatttttgcactgccattgtaattgtagtttgagtatattagtatatagtaagatacaaactatacaatcaatgttgacgcagaaacgcgtctagagacattaggtggaatagcaatttgcaccacttatagttagcctagcaattggaaagagttgcattcgtagttaaattagaaggttctgttcttttgggttagtagttaaagacttggacaatttataccatgtgcttttattttttgtcatattttacgactttatttaaacctaagaattttaatttatcacaaagaaaacaaacaaactaaataattaaaaaacgtgaaaatttagtgagtttcaacgtcaaaaaggacaattgagagaaaagttttaagtttgatagattggcaacctaatagtaatagttgcagctaccgacacaaaaaggcaagtgtcatttgtaatacttggagcatgtaggaagggagatcgaatataacactaaattgacaatactatatgttttaaaaaattcacgagattcttgggtgtttccatttctttcttcataactctgtttgcttgtcttctgattttccattcttcccctttaattacggttgcaacgaacggcatgagctaaaggaccaaaagcacttttccttgtaaccgaatttgcggggaaatggtctcgcatgaggaaaagccacccaaaacgaaaatcaagcaggaattagtgccacgacgttaattcaaatgcaagtatatttattggtcacaatcacaaggttcaaaatgtggaaacccagcagcacaagagaccatgttcccatttattagtactacttcattttctcattcccgattggtcgacgcgctctgttagcgcgtggaagtgtcaacacggttggtacttttcactttaggacatttttaaggaagcgtgtgtttgtgtgaaagtgtcattttccgtgaagcacaattaatactagatttacatcaagaatgtttgaatgtcgtaaaaggaatactagtagtgcagtagcgaaaatgccaccctgcagcaacgacactatctataattgggataatttaatgaacagcagtaattaattctgcaagaaaatcaggaaaccataatggcaattcgtgatcactcagggcactcacgatttaagacagggacttttaaagattccggaaatttcatcaaaaccacgttaactcaagtagcatatgttaagacaaaagaaaagtagcatatgtgaaatataaatcagaaaaattccagcaggaggaaatttatcaaatgttgaaaaaaattgcttggactatactctttgaaactcgttatttaataattttttttttggagtcaagttgaaatcaatataggattttacctattaataataataaaaaaggcataggtagcacttctcgatataaatgcaacaaattaacactactagaaaactaaaagcttgaacgataaaagaggcgggggggggggggggggcgacaaaaaaataatcaatggaatacttggtaattgaaaattttaagatggtgaactttggccatttagttccatctactaatttttgcaagtcgtgcatatttatttatttttctcgaagaaaaccttagaaatcaatatatttttataaggaaatttctatttaagttttttgtttgggggagaagttaaaataaaggcaagaaactcaaccaaacacatgtcttggcccaagcctagtgagtacacgagatgcacaccatggcatcgagttcatttgttttgggcattatgccatggcccaaagcaaaacctgctgtgacctgaatcttcaatatatagtactcgaatctccttattttaggatcttaacaatgcattgattctaccgattttaccatcgtacgacagggcccctgatccacgaaacaaaatgctcattctttagttctatgtcactgaataataacccaatctatattggatttttcattaatacacagcttgttgggtaatcacggaccctcaaatatcaaatgcggaagcggaataaaatcaaatgaggagcgagagagacaatcaaatagttttacgtgggagaaaaccttcttcaacacgaagaggaaaacccacgggaccaattccagatcaaatattcactataacaataatgggttacaatgaatcaaatacaccaatgtggtggtacactcaatctctcaaacaatggtgatcactcaaactccctaaagtgtttcactcaaactctctctagagatctctcaaatatgcacagcacaaggcttgctcaaatactgcggaatctctcacgcagtcaaatatcaaatggcggagtatctcaacgccctctcaaatatgcaaacatgaaggcttgctcaaatgtgctctcaagactgtcacttgaggctctcaattttctgtgtgttttgccttcacccttgctcatctatttatagggtgaaatggactgggctttaagccatcaaatcaaataagattatatcttatcaattaaaagatatctattatatcttatcaaataaatattttctcaaataaatatcttatcaaataaagataagattatcaatcaactaaaaacgaaaattatccaacaaatctcacccttccgtttttcagtgagaccagggttcttcaacttcaacatcaacatcccggccttctttctcggcttcaatgtgccgaattcattagcccggctccttcacagcaatcttcaaatttccatgctggtaccggcttggtcatcatatcggaccaattcaaatcggtgtgcactttgccaagtattctgcaacgtactcagcctcggtcgtccatagtgccacacacttctgcaatcttgattgccaagagactgttcctccaacaaatctcatcaaatatcctatcgtcgattttctcgagtcggaatctccccctaagtcggcatccgagtagccttgcatctcggccaactcataagtctggttttcatgcagggaattcgtcacgtcctgcatttccttcttggggtatctcggttgttcttcttcaaccgttgtagaactcggttcatcaccccggttctcttcatcaactcggacctcaatatcttggtcctcatcagcttcttgctggagatcatcatcttcagtttctccccctgcttcagtctgcacaagagggacgggttcttcacctcggtcacgagggcagccgggttcttcacgtctgacagtaacccgatcttggagcttcgagatatcatgaagagtctcatcttcatgaaagatcacatctcgacttctcactatcttcttcttgataggatcccacagtctgaacccaaactcggttttcggcgaaccaaggtagatgcattccttcgtcttctcatcgagctttgccctttcatctttagggatattcactaaagctcggcatccaaacacctttaggtgatcataggtcgttttctgtaacgtcccgtatgcatccggttcattaacattgatttatggtcattaagcgcagcaattatcacagataattaaatttggaagcgataaacttaaatgacatcatcaagcgtcatgaacaaccactgtacatcatatatggtgaattcttataatatacaacgtatatttcaaaactatacaaaatccctatcaggatacaaaataacaggcatgtatcaaaagatagagccaacatgctcttaaacactatgcctaaggttctcacagaacctatccctgctcgggcctcttgccctgggatctctcagcagctccctgagaatcacctgcaaaacataacccccaacaggggtgagataacaatctcagtaaactcagggtccttggaggtctttcctccccctggttcagttccatggcatataatatcaaaattggcattttaaactagtaatcacagctatcaagcaatattaccacacatacatagcatatttacaattatgtatcaaggcctgaggaggcattatccactatgtgggcacatctcacttggaggctcatccactatgtgggcacatctcacctggaggctcatccacgatgtggacacatctcacaacaggactttcatatatatattctatcaaatataattctactggccagagaatctcatcaatcacatatacaacactatcacagtgttcaactcatcatatgcatatgttcataaaacaataatcacacaatttcaatatacatgcatcatgatatacaataaccatcactccctcggagtatggtggaacacaacagtgggaaacactcccaagaacaaagagcttacctgctctcagcgctataccggctcttccggtttcgtggtcacaaccaccagcaagattactatcacgccctacacaagacataaaacaatcaatcaataacggtccttagccgttagaatgaaaggaaatgccattcccttccattaaaacctctctgttctctatcttaggattatcagagctaaccaccttataggtgattcacagaccctcaacaggatctatcttggtccaaccaagatcttagagtccccttagactctgcataagctcaattcaatgatctactaggtcatatatcaacaatttttcaacttggctaaaacagctatatcaacacattttcaccgtttatttatccttctgaacaacttttgtaaaggcacttaggctcataactatcataatatcttccttttactcaacatttttcctacccatacctatctcagggtcaaaaccaaacttcatcaaaaatcatgtttcaaagtttaatattcatcagaacaacctcctgagcatacttttctaaagaactcaagcctaattctagccctatcacaaaagggtcactattcaccccaagaacaaattctcaaatcaatcggtaaaacttgtgtttcttacctctaaatcgacagaaaaggctagagaacagcttttccaagcttgaacgtccttgaaccgccttcttttctcctcagaatcaaactttgtgaatttccctagagaactggatctctttgtttgatggttttcagagaaaagtgatgatggaatctagctcattgagtagttcctttcaactttcatgttgggtgtgaaaggttttggtcaacggttgagtgtttaagaagcttctctagttcatcaatggcagaagcagagaaaaggaagaaaggaaagagagagaagggctaagggaaagagagagaaagagagaggctgttatattcaccccacctttttaagaattttgtccgcaaaattcaaaaacatacctgtcaaacaactcggggtatagctgtaccagctcctgctctcgctcccaagtcgcctcctcaggtgtcctcccttcccattgtaccttaactatgggaatggtcttactccgaatctgcttctccatcctatccagaatccgtataggctgtgtaggacaagttagattctctcgaatctggacggtgtcaggctccaccacgtgcgacggatctggcacatacctcctcagctgtgacacgtggaaaacgtcatgtagccctgacaactggggaggcaaagctagcctgtaggccactgatcctactctctgaagaatctggtaaggaccgatgaacctaggactaagcttcctcacacccaaagcgcgtccaacaccagtaactggagacaacctcagaaacacatggtcgccctcatcaaactgcagcggcctgtgtttatgatcataataacttttctgtctactctgagccttcaacaacttatctctgattaaacggatctgctcagtagtctcctgaaccatctcaggtccaagaagctgtctctcacccacctcagtccaacatacaggagtcctgcacctccggccatacaatgcctcataaggtgccatacctaaactagcatgaaaactattattatacgagaactccaccataggtaggtatcgatcccatctagtaccttgctccaaggcacaagctctcaacatatcctccaaagtctggatggtgctctctgtctgaccatctgtctgaggatggtaagctgtactaagcctcagctgagtcccgaaagccttctgaagcgtactccaaaatctagaagtgaacttcggatctctgtcactgataatactctctgggacaccatgcagtctgacaatctctctgacatatagctgagccaacctctctgcagtatagtcagtccgaacaggtaagaaatgagcagacttggtcagcctatcaacaattacccagatggagtcacatccactctgagttctcggtagtccaactacaaaatccatggaaatgctatcccatttccactctggaatctgcaacggctgcagtaggcctgacggtctctgatgctcaatcttcactttctgacataccatacatgtagacacatactcagctatgtctctcttcatccatggccaccaaaatctccacctcagatcctgatacatcttggtggcacctggatgaatgctaaactggcccttatgagcctcagacagaactgcatccaccaactcgcccttaggcacaacgatccgatcttggtacaacaccaagtcatgagtctcccaggaaacatcctgttgaccaatcatggccctcacatcatcatcctgtttctgggcttcccggatcctctgaattaactcgttatcaatcttggtctctctcaactcaagaccactagcaccctctgttacagtcaggtgcatatctctaaactgctcaatcaacttacagtctgagattatcatgcaggcaacactcacatgcttcctgcttaaggcatcagcaactacattcgccttgcctggatgatatttcaactcaaattcataatctttaaggaactccatccaccgtctttgcctcatattcaactccttctgatcaaacagatacttgaggctcttgtggtcactgaataccactaacttggcaccatacaagtaatgcctccaaacctttagagcaaagacaatagctgcaagctctaaatcatgtgtgggataattctcctcatgtggcttcagctgtctggatgcataggcaactaccctcttctcctgcatcaacacacatccaagtccccgcttggaagcatcacaataaacctcaaaacaatcctcaggatcagggagagtcaatactggagctgtggtcaacttttccttcagtctcaggaaacactcctcacattcatgagtccaaacaaatgggctacctttcctggtaaggcgggtcaaaggtaacaccatctgtgagaacccctgaatgaacctccgatagtaacctgctagaccaagaaaactacggacctctgaaacattcttgggcctttcccaagacatcacagcttctatcttactgggatcaactgctaccccagctgcagaaatcacatggcccaagaatttcacctctgaaagccaaaactcacacttagacaacttagcatacagctgattatttctcaatgtctgcagaacaatcctgaggtgatcggcatgctccgcctccgttctggagtaaatcagtatatcatcaataaacaccaccacaaactgatctatgaatggtctgaataccctgttcatatagtccatgaacactgcaggggcattcgtcaaaccaaaggaaatgacctgatactcataatgaccatatctcgatctgaaggcagtcttcggtatatcctcgggcttaatccgaatctggtgatatccggatcgcagatctatcttggagaacacacttgcacccctcaactgatcaagcatatcatcaattcgaggtaaaggatacttattctttatagtaaccttattcagttgcctgtaatctacacataaccgcatacttccatccttcttctttacaaaaagaaccggtgctccccacggtgacacactcggtctaataaaccccttggacaacaagtcctcaatctgtatcttcaactcctttaactctaaaggagacatgcggtaaggagctatggatatgggtcccacacctggaaccaagtcaatggagaattcaatccccctatccggcggaagctgtgtaatctcatctgggaaaacatcaacaaactcactcaccatcggaatctctgacatatccaacccttgtctctcatctgctgtactcagcaaaagatagccctgagctcccctctccatctccttgcgagcttgcaagaccgagagaaaagaaatggcactcgagctgacttcatctgaaggcactacaaccttcttataacaacaatctagcatgatgccatacttggccaaccaatccatacccaaaataatctcaagggtaggcatcgtaaggcaatacagatcaacaacatattccttgccctcaaactgaaaatgcacatctctgcagtacatatctactctacattgctccttagaggcggtgataacctccataggagaagaaagtctgaacataggcaagttcagtcctagagcagtgcgatcactaataaaagagtgagtatctccagagtcaaataagactctcacatcatacacatcaatcaaaatagtacctctgatcaaatcaggaggtctggctgcctctctagcatccactgtgtagactcgtcctgcagtaggtgctactgatatcactggagcagctatagcccgaccgcctgcctgtggacactccctagcataatggccatgcttgccacatttgtaacataccaactgaccagtggaacacactccccaatgatttttcccacaagtagcacacttgggacgtggacctggtctcggtgaccctcctctctggctggagctcttcttgaatctatctgctggagaagaaacccccaaatctctgctcttgcccttcccagtagggcctgatccactgggtctcctcatctcctgtctctcagaggaaataggctggctgccactgcgtctcctaatcatatcctctacctggcggcactgtctcaccaggctgcccaagtctcgagatccactgccagctatcttctcctcaatactctctctaagtcctctctggaacttagcagcaagaacctctgcatcaggtagagccctcctgaaatgtgcatatttagccaactcattaaatttggctaagtactcatccactgacattttcccctgaacaagaccctcaaactcggcctgcttctgctctctggcatctctggggaagtatctgtccagaaattgagcttcaaaaacctgccaggtaataacttcaccctgacctctcaataactctgaagtggtaacccaccactcatgcgcatctccctgaagcatgtatgtagcatagagaagtctttgatgatctgaacattccatcacagtgaagatcttctctaaggcctgcaaccatctgacagcagcaataggatcatattccccatgaaaagctggagggtcatgcttacgaaaagcaatgagcatcttccctctagcagctgtatcctcctcaacatcagcttgggacaaccgtcccctctgtggtgactaggcccatcagaatgatgactacctccaccctgctggcgactaccctcgccctctggagtatgctgtgcagaagatactctatcctctctacgcagagatctcaactctgccatcaactcctcattggcctttgccaaggcctcattcgcctgtctactcgcagccatctcatgctgcatagctgccaaggcggctataactgggtcgggttgtccatctgcacccgtcgtctcactattgttccgggtcctcaccatggcactgcacatgtcacataaaagggtgagttgatcaggctcacactcaataaccacacatgcaatagtcataatgaacacctagaccattagtgaacaacacacaattcaccatacataatgcttccctataaaattgctctgataccataaaatgtaacgccccgtatgcatccggttcattaacattgatttatggtcattaagcgcagcaattatcacagataattaaatttggaagcgataaacttaaatgacatcatcaagcgtcattaacaaccactgtacatcatatatggtgaattcttataatatacaacgtatatttcaaaactatacaaaatccctatcaggatacaaaataacaggcatgtatcaaaagatagagccaacatgctcttaaacactatgcctaaggttctcgcagaacctatccctgctcgggcctcttgccctgggatctctcagcagctccctgagaatcacctgcaaaacataacccccaacaggggtgagataacaatctcagtaaactcagggtccttggaggtctttcctccccctggttcagttccatggcatataatatcaaaattggcattttaaactagtaatcacagctatcaagcaatattaccacacatacatagcatatttacaattatgtatcaaggcctgaggaggcattatccactatgtgggcacatctcacttggaggctcatccactatgtgggcacatctcacctggaggctcatccacgatgtggacacatctcacaacaggactttcatatatatattctatcaaatataattctactggccagagaatctcatcaatcacatatacaacactatcacagtgttcaactcatcatatgcatatgttcataaaacaataatcacacaatttcaatatacatgcatcatgatatacaataaccatcactccctcggagtatggtggaacacaacagtgggaaacactcccaagaacaaagagcttacctgctctcagcgctataccggctctcccgacttcgtggtcacaaccaccagcaagattactatcacgccctacacaagacataaaacaatcaatcaataacggtccttagccgttagaatgaaaggaaatgccattcccttccattaaaacctctctgttctctatcttaggattatcagagctaaccaccttataggtgattcacagaccctcaacaggatctatcttggtccaaccaagatcttagagtccccttagactctgcataagctcaattcaatgatctactaggtcatatatcaacaatttttcaacttggctaaaacagctatatcaacacattttcaccgtttatttattcttctgaacaacttttgtaaaggcacttaggctcataactatcataatgtcttccttttactcaacatttttcctacccatacctatctcagggtcaaaaccaaacttcatcaaaaatcatgtttcaaagtttaatattcatcagaacaacctcctgagcatacttttctaaagaactcaagcctaattctagccctatcacaaaagggtcactattcaccccaagaacaaattctcaaatcaatcggtaaaacttgtgtttcttacctctaaatcgacagaaaaggctagagaacagcttttccaagcttgaacgtccttgaaccgccttcttttctcctcagaatcaaactttgtgaatttccctatagaactggatctctttgtttgatggttttcagagaaaagtgatgatggaatctagctcattgagtagttctttcaactttcatgttgggtgtgaaaggttttggtcaacggttgagtgtttaagaagcttctctagttcatcaatggcagaagcagagaaaaggaagaaaggaaagagagagaagggctaagggaaagagagagaaagagagaggctgttatattttccgacctgtccagacttcttcaggaatgtcttcttcaagtggtcttgatggtgacaaattaatcaagtcaactgctgttctgacggcttctccccaatatgctttcgacaatcgagcattggatagcatacttcggaccttttcttcaatagttcggttcatcatctcggcaagtccattcaactgcggagtctttggaggcgtattctcaaatcggatcccggcttgtttacaataagcatcaaagggaccgcaatactcaccaccattatcagatcgaaccactttcaacttcttgccagtctccctttccaccatcgcgtggaattctttgaaacattggagtacctggtctttggtcttcatcaaataaacccacactttgcgggaatgatcatcaacgaaagaaacaaaatacagagctccaccgagtgatctctcagtcatggagcatacatctgtatggacgaggtcaagaatcctcttgcgtagtctgggctgatccagtctcacaaacgaaacccggtgctgtcttccagctaggcagtgcgagcaactctccagcacttggccattcaacccggttaatagtactttcttactcaacatttggagtcctttctcactcatgtggccaagacgcttgtgccacaactccagggaatatccatctctgacagaattggtttctccaccaattgtctttccttgcatcacatacaaggaaccatctttctttccacgagccataaccaaatttcccttggtcagcttccatatactttctccgaagtagtttaccaacccggcatcatcaagcttgcctaccgagatcaaattcaaacgcatgtcaggtacatgcctcacatctttcaaaagaagtcggcacccgacatttgtggtcaggattacatcaccgacaccaacaatcttgctggtcacctgatttcccatcttcacgacaccataatctcccttcctgtaagcggagaagaatccctcatgtggggtgacgtggaacgaggcaccggagtcaacaatccaagtgcaatcatcatgggctatgttcaacatttcctcactgaggaggaatatctcggtattcgggttagtagccacagctgtagtgctcgtatcattcttcttctggggaacaatctgatctggcttcacacagccattttgttcatcatttgcaaggtccagcagtcctacctcttgtgtcctaccttcccacagtagaagcacttcaaatcatgttttggcctagtccggcctctggacgtatctcgtccacctcgactcttgccacgaccccgggagtcggtctttcctcgattctcagcaacgttagcctcaaacgtgctggatacacctcgttctcttctcctggcttcttcattcaggaggctgtctgtcacggcatccatcgtcagttttccttctggaatcgagttgctcaaagtcaccaccaaagtatcccagctttccggtagcgaactcagcaacagcaaagcctgcatctcgtcatcaatcttcatgttggctttggacagttgattcaaaatacctttgtaggtgttgaggtgctcaatcatactcatgccgtccttgtattctagcttcacaagccgacgaaccaggtgtgctttgttcctgggagtcttcttctgaatcatggattctaacttgttccacaattcgtacgcgttcgtgaactcggacacgtgctcaaagaggcttttgtcaatatatttcctgatcgtggccacgaccttccgactcaggatctcccactccttgtccgacttcccggtcggcttcacttcaaggataatgggatcatataaatccttgcagataagatgatcctccatcatcgacctccaatagttgaagttatctgcagtcaacttgaacatatctccgtcgtgagttatgccactggtctccatctcgtctccttcagaaccctcgaacctgggctctgataccactgttgggtaatcacggaccctcaaatatcaaatgcggaagcggaataaaatcaaatgaggagcgagagagacaatcaaatagttttacgtgggagaaaaccttcttcaacacgaagaggaaaacccacgggaccaattccagatcaaatattcactataacaataatgggttacaatgaatcaaatacaccaatgtggtggtacactcaatctctcaaacaatggtgatcactcaaactccctaaagtgtttcactcaaactctctctagagatctctcaaatatgcacagcacaaggcttgctcaaatactgcggaatctctcacgcagtcaaatatcaaatggcggagtatctcaacgccctctcaaatatgcaagcatgaaggcttgctcaaatgtgctctcaagactgtcacttgaggctctcaattttctgtgtgttttgccttcacccttgctcatctatttatagggtgaaatggactgggctttaagccatcaaatcaaataagattatatcttatcaattaaaagatatctattatatcttatcaaataaatatcttctcaaataaatatcttatcaaataaagataagattatcaatcaactaaaaacggaaattatccaacacagccattatgttgagcagatagttaagtttgtggctatgtgttggcgatttcagggtacagattcttcaccagtttgctgacatgactaaagactatagtacacggaaatgttcaatgaattcttcttactctttacagatgagtagaatcaaccgcatcattcttgtttactcatgttatggcatcttattcatgccaaaacatgtaatgctaccacttatatttgttaaattgcataagctctaatttttttctaaattacataggattttcttttctcctaattaactctcattgcaggtagatttggtgtttctcgatggtctttcttcttgttagttacttcatcctttgtcaaaagacatgcaccttaaagttattgtgtataattaatcacaaaataaaattttccattttgtttctttagtacctaccaaactctcttgtgagcttgtggccccatatattgtcttgtacacaacacaaggagtcaagttataattttatttcattatatttccacacctaacaaactcgtggtctcttttgtctcacattctacaaaggataggaataaagctaagtatgtaactcttcagtaaaagtgtaaacccttctttctttctctcacagtttaagtgcatctttcaatatcaggcgaaaaaatgtttgaggtaaaaatatttttgcaaagaaatcacgactcttgtttttacttttattcattggattatattgcaatacgctacagtaatttcaactaaaaataaaacatacagtaattgttttaacccacttggcatgtatgaatctctgtgcaggtgttttgttccattctaaatggatattttttcattatctctttgaatttgagtagacaggactgacttttggtccactactttaattttcgtggtgccataagcagaatcaaggggaactgtcatggcaggaggtcgccaaagctcagaatatctgttcatccaatacttgaaagattttattatcattattgttctattttcttacgaacagaaatgtccagttagaatgctggtaaatactatatagaattaagctttctctcaagatgtttatggaagagaaacacctttaaagaaataatcactatgcacgaagcgatactggtgagatgtgtgcagtgttaatggaaagaaaagagaaaagtgatatgtgcgtacttttttctctagaagcatcccttatttatactgaacttacctctaagttagtttaagattctttccgataatcatgccgagatctctaacagcttgacctcacgatcttcctaataatcacggccgacatctttaactatttaaccttacaatctttactgttattatccacaatatccacgatctcatctatagttgtaatcaaagatatcatctaacaattattaattactaatatttagcttttaacaatttatttggatgtaagagtaaaataaggagaaaataaataaaaaatgcaaataagatagctgtataaggtttaaattgataaaaatatagctgataaaataatatcagaattaatagatttattaggataaaatcatattagattaaacggtaatcttataattttttatatatttgatattattgtattatgtggagatcgaatttagattatcttttatatatttaatatttattatcaattaaagtacacaaattaaatatgataagtatatacttatttcagtataagatagaattaacgtatctacactccaggtattatcttattaatagccaatagacaaatgtatcaatattaaaattagtattaacacgaatttaaatttgatacactgtttttttattataaaaaaatgcgaatacctagatatacatctaagtgccaaaataatgcacattgccagacaagtactaaagtaggtcgagttgtctctcattccaataaatttcaaagtggacgataactcccaaccacgaaaattaaaggagttgggacaaaaacatagtctcaatggactataaggacacatctcacctcaccaatagcaccgtaaagggaaaaaaaagtgtttaaatgaccacaaatttcacttctttttgacaccaaatgaaaagctaaccacattagacaaggaattgctgattctgctatgctgtgattacacaacacattagacataccaagtcaatgatgctgtaaagaataaactcccaagactctactgaacatcctatctttttttgcaattgttcctggtgtcttaaaataggaagaaaaaaaaaaaacgtttactactttgaaggtgcgaatttatttaatacttttttaaactaattaaaaatatataatatgaaatattaatattttaattaatacattgaagatacttgttaatagtttttttcttttttaacatacctatttaaaaattaatactccttgttttcccctattatttaaggttttaatacacaaataataattatatttgtgcactcactttttattctccatccttttttatcacatttttcttcttcttattttttgtttcccttcactcatatacatcaaaatagagaataaatttattagaacccatacacaaatttaaaataaataatcttatcatatatactaaaattatctgtcaatttttttagtatatcttttactctctttttttcacttttacatttcatatacaattatttttgtctctcttttaataaggtatacttaaaaaaattgtaattaatattagagaaggtacagttttaaaaaggtgacatgtaaagttatctttaatcatattttttaattttaaaaaggtacagttttaaaattttaaaaaataataatcaaggactaattttaaaaaaataaatataattaatgagaaggtgacatgtaatttaattgattaaaaaaattaatagtatcaaaacacctcaaattattggggacaccgtatacactcccttaatattatctttaaatttttatgggacataaagaaaaatattttttgaagtgtgaaataaaataaaaatagagatggtaaatttttttagtagaaacaactaaccaaccaattaactacattggttttcaaaatttcaacatactcaatcaaccagccaatctgctaaaataaaggcggagtttaatcccccaagcccaggatttcaaatagattttttggaaattgaaaatagtgaggaagagataataacttcaacatcttactcagactaactgaattagatttcttagcttcacagaatttcaaatagtagttacaagtacatgaggcaagaatgattaataattaataatatgcggccttaaattgtttggttttttctgctgctgcagaaacgcttacaagttacaagggagctctaggaaaataacacaataatcttattaatctaggtgcatactatatattatatagagatatagaatagaaatctcatagttcattcagacttcagagagtggtttctaagttctaatcaaccctcctttggcaaacaactatttgtagctgttcttgacagattgaaccttagtagcctcttgtgcaccatcatatgacttgtcaacattctgattagtcaccccttccttggtttccttggccttttcctctgcaactctttggaactcttcagctgtggaaggtgccctctcttccatcaaacggttactacggtttccattgctcgcttgcccataattctgatactttcaataacaaaaaaataatacattactttctggtcactgtaacatgttgtcaacacataatagaatcattctttgagtgcatgtgtggattttattagagagttcaaatatgcttttacacttaaattaacaaattctacctttttcattttatatattgaaattcacaaatataaattggaattcacaaaaatacttttccaactttaatctaattaagcttagtttgtctaggttttaatccatttctcaagtctagatttccaccttcaagaactggattatgcaaaaaaatgaaaaccttccattaaatacatgaattctaccttctcaaacacatcaaaaagttaattaaaacttgtttccaaccaaaggcaaaatcaaactaaaaatgattaaaattccacgttttgttagtctaatttaattttctagtgggtgcattcgtacaaaaaataaaaaagtttccacagcaagtagataatgtaaattagtaactctagagcagagaagcaaattgaagtagaataacttggaacacgagtgaaagaaaaagaaaagaacagaacagagatttaaaaaggaaatgaaaataaaagggataccttaatggtgctgttgaagaatggcttactactgctaggctttaccatggaggatcttgaagtggcatggagaagagagtggaactgaccacctaccatggttcttccctctctctatcttcaggaaatgtttggctgtttgatagagactagttactagttagtataatttgggctctcatgtctgtttaaataaaaaccaaaaacaataaggacaagattactcctggcctcaaactcaatccagatatccatgtattgccctttgttaatgacgtaatgctaatccaatgaatctgtctagtctatcccacttattaatgacttataccaaaagaaaaatctccatcaatgactaaactgcattacacttatcacaaaattaattaaattataatttcaatttaatgattaacattaatatttaatttcaacctttattacttaagtatattgaaataaaagaaatactaacaacatatttttgaatatactcttttaaacatattctttatagttgactgaaatttattgataattacaaattttttaagtttcatttgttatttaatgactctttttctcttgattttgtaatttttaatatattctaattaaccaatgataaagtgtatgtgttagatttaaaacgaatgatttgctaacatttttcaataaataaaattgaaaatttactgactagattaaaaaatgtagttactaaagattttctataaaaaatatttatttttctctctaattatggataattattattattttttataagtattattagaaataaggataccatgaattttatttatcaaaatggaattttttttggtaagtttttccatgttgaattgaggttgaacaatcatttttaatttatcaacaaagcgtccgttcaagaaatgatcacatattttagttatatatgttgttttaatttcatcattagataatcaaattcaattttctaatatatcaagagaaataaattctttgtctataacttttttcctatttaaaaattcattgctaaatttgtaacatattaattgaatagtgtaaaataagatctcacatctaatatgtagtaagtgtaagctttcaaactcatctttttgttaagtaaaaacaagcacctttataagaatatttttatagtttatattgacaaaattactttcataattcaaaatacatgttcaattttttccccatcaatatatctgaataatattttttttaacaaaactaatttatttattttaatcaaaatttaatttaaaagttaaaattaatgtatatgtagtcagaattataatctttaacttattcttactttcctcattttaagaggctttcttcactttttcgttgggagatgtacttcacaatctttctttgtaattattgaaaaaaaatacagtaacttttcttatttatgtaacgaattgattttaaaaaatgaatttaatgaatagtggagcatttagtagaaagtaagttttaaatgaaaaattattgttaggtattatgagaaaggtagtactaacatgtttcaactgtgtcattaatgagtaattgattttgtgcattcattcactagttataatacattcatttattatttttaaggattttatttatttttaaaataaaccaaaataaaataaatgaatatattttttatatgttattgatgtgaaatattcatcaattttattgatgactaattttcgaaaaatatgtttaactacttttgttgtgatcttttcttttatctacattttttcattcacaatatctcaaaactttacttacttattttgagtttaatatcactcaacccaacaatatattagtggaaaattaaagatattaatctataataaatatttatttattataggttgtgtttacaaaataattactaaaactaactttgtaaatgtttcataaaattattattgtgtaattattattaatataatgtatatcgacattttataagtattgaataataataaaacaataaaataaaataattttttataagttatttttttttttggatttaaagataaatgtcggaagtgggatttgaacccacaccctctaacaaacttgagttgggcatcctgactttgataataaaaggttaaaactaattaaggagttatacttttttaactaatatatatatatatatatatatttacataattaaaattagttaatttaaataattaaatatttataggaacataaaaattttaagaattatttttgtaacttccataaatgatatctaattacaaatttttaaaaaatatttacaaaaaatattaattataatttaactaattataataatttatgttcaatataaaaactatgggaatatagaaataatatgtgtgtatatatatataatggaattttttatattcaaagactaattataaaagtaaaaaaaatgttaatatcaaaacaaaaaatccaatcaattcacgcctttattaatccttttagagcatacaaaaatgattttttataacaccctaacataataattaagtttattttttgaatgaaatgttaattaagtaaaaactactgtactttttaataaccatatcaatacgacattagtaattaatactagttttttccaatatcaattcgaagcacagtattattggactagaaagtaggtaaccctgcttttgcgcaggaacatcgtcaacactcaacataggatagatagtttgttcgttgcgttgccatgtcggcgtcggagattcttcgggaactggatttgctgaaggacgaaaagaccaaaattgagcacaaaatctctgcgcttgaagctcaactcaaagagattaatctccaaaacgacgccgcaccaccctatgcttcttcttcttcattgtaccccaccaatggattgacccaggacatgattcacagatacagtcgccaccttgtgctcccttcctttggtgttcaaggtcttcttctcttcaacattttctatattcatttaattatcattcatgctacataaacctaattaagtttaaattaagaatgaaggaagattcatattcgttgcacgtgtgtgtttgagtattaactgtagttagttccatgttgcaactgctttatagtaacaaccttaacaattgcaattttgccatgtattgttttcactgcgaaaatagacattatagacaaatagcccttatctgcatgtttatcttgtttttttttttttttttttgtcttaaattttcccaccttcttgtgtttgtggagtgcagggcaggcaaatctattgaagtcgtcaatcttagttgtgggagctggaggtttgggtgctcctgcattgttatactttgcagcttctggtgttggtaatatatgacacttctaagctttgtttggataaatttttcataaacacttataagtgaaggaaataagaaagaaaaatgaagtcaccttcttgcacaagttaaaatcatcttatacacttaagcttttggagaagataagtgccaagttgattttaacttatgggggaaacttaatttattttactttcttattttcttcttgtcccaaacataacctctgtctatatgcttcttgaaacttacattttaaaaactatactcagggcgcttgggtgttattgaccatgacgtagttgagctgaataatatgcataggcaggtattgtattatctgttttaccttcccgccctcttttggcatagctggtgcaacacgtacattgtgaattgttgtgtttgtgtctggcatcagcctttgggcgtttgcacttttgcgagtacaaggtgttatatgtgtcttgcttcagtgtttgtgttcgtttactatttttttaattaacttcactatttttattaatttggacaagttggtgctttatttcaggttatccacacggaagcatatgttggtaagccgaaagtgaaatctgctgctgctgcttgtcgctcgtaggttactttttcaccaaccattcatcacatcaatttttgttgacaaactgcaaataaaatcccatgagaaattttctttttcaaatgtttgttattgtaatatttgtatcatcattgttcttggaactaagatattttgaatattaggatcaactccactattcaagttgtggaacatgaagaagctttgcggacttccaacgctttggaaattctcagcaagtataatttctataataagattgatttttctttttgcttgaggcctctttcttctatacttacattttacatttcattttttatattaccactgactatttttttttttttttgtaattatgtgaatttggtagatatgatataatagtagatgcaacagataatgctcctacccgatacttgatcagtgattgctgtgtggttctaggaaaggtaaatctgaatgttttgatgtatgaacagattgtgaccatttgaattgatgtcacatgggccttttcacttgttgctttaattttttggttcctccatgaatacactttctaagtcagcattatttttaatgttttggttcatcaatgcaaaagatatctacattaattcaacaaaaaggaagttatgcatgctcctatgtgcatgataccgataaaatatttcagtgtgtatgtgccatatgagttgttatctccaaaatctttgtgcaattgctcccagtagacatcaattttttataaatttgaaaagttacaattatatgaatttcttatatttcattccgttaaacaatttcgtttttggttcttattttttatacttatgtacatagtatgatttatgggaaaacttaagttacttttgcaattttttatattaactgttttcctgtgatgcagcctcttgtatcaggtgctgcactgggattggaagggcaggtatatgtctaattttttttcccctagcatttaagttgaataatgcttcatagtgcgacaagtactcctgtgtgcttgattatatcacaatttgaggattaaatattgaaacttttactgcagcttactgtctacaattacaatggtggtccttgctatcgatgcctcttttcaactccaccacctagaacagcatgccaaagttgtgctgagggtggagttctaggagtaggtaaaattactactgtctttgtgaactgtatcacttttacttctcattgctagtctgcgagacattttcattagcatgaacaatgtgaaccataagacaaattcttctgctctcctgttttcattgtgaagttcagtcatggacttttagtaatgtgtactataactattagtgacaacaaaaaatgattctgattgtttgattccttttgccaaaactgtctctacaaacggggaagtatctatgttttaagcaatcaagttttactgaaaaggaggtttttgcaaacaataagaaattcttattgtttaccggagagtgtactctttagtaagacttattggctaaaaattcaatttgtttggaatgttttaagttgtttcataattcgtttagctaaactgtgattattatcatccgtgtcagttattatgaatatttattgttcaacttgcattacttctcactagtacctttgtattttttgttctgctattgctatttttctgcttttctgacatttgctctgatcattttcagttcctggtataattggctgtctccaagctcttgaggctattaaaattgcagcttctgttggtgagccactctcaggaaggatgcttctcttggatgcattgtctggacggattcgtattgtatgttaagaactccaatgtctattaggattttacaagtggggcatcaaataattgtttgaatgtttaggatttcttataaattaggattttatttcgataaattacctggatgcaaagttagggttttgtatcctagtggtattggaactattagggtaaaggttttcctacttaaggatactctttagaggaattgattgacattactattgagtgattctcatattcacaccaatttttctgtcactaataataactgtcatgcagaccaatcattttctttataattctaataacaaattgcttttcaaactggctatcccaaattaaacttagacttgtaatatatacagttccaaatcatatttgtaattatgatgtctcaaagtaaaaaaattatattatggtttttgaggatgataccatagcaagatcttatttatcagttactgattatactttttttattacacaggtcaaaattagaggaaggtctatgcagtgtgaagcttgtggagaaaatgcaacatttacccaacagcaattccgagaatttgattatgagaagttcactcagactcccttgcgtgtggtatgatttcttttttttcttgcctttcacctcctttgtatttagatgaaattgtttgaaggtttagttgggtatatttttcatttgcactttgtattggatgagattgctggagataaaattcctcccaaaagactacaaaattgtctcccagtatatattattttgagattttccatgtcattaatgcattccattccatttatatgcagcctcctttgaagttaaatctacttcccagtgaatcaagaatcagcagcaaggagtacagtgaagtaattattaagaaggaaccacatgtgctggttgatgttagaccaactcaccatttcaagattgtatctctaccaaagtctatgaacattccactctcaacattagaggctaggctgcctgaagtatcatcagctttgaagaaagaggaagaggaaagtggtgcagtttctggatcaagtgcacaattgtatgtagtatgcagaaggggaaatgattctcaaagggctgttcagtatcttcacaaaatgggtttcacttctgccaaggatattgttggtggcttagagtcttgggcccacaacgtggaccctaggttccctacatattagctgacacgtatagctatgctaaatattactttcattaagttatactgcttgcttgaaattatttctccctatattttattagtgacgttgctttcatttttccatgtctatttataacattcacgtgacttttttttatagtcttaattgattttattcttgcttttgaattgttatagaaaaattgtagcctattcatttttacttttttcttcgcattgggtagagtttaaaaaaccacaggttattcacgttgttgctacagttgccaataatagttactttccattcctttcatcaaatgatgtttgctgagacaataatatcacatggaaaatactaaatgttacgaaaatttcattgtacgaatccacacaaatatacgtggctacaaattataatacctatatcggagttaaattaactgattcgtgaatttcatgtttttgtttttcgtacggtatagcactgctctcaaagtattaaatatccatcaatttagttcctattttattaacattcaaagactaattttaaagatattcgatttgtaatttcatgaaattattacgataataacaactcgcgccttaacatggatttccataaagcctgaccacgcacaaacacatagtcatatagaacaaaataccttgcatcacgtatcccaatccctactttgatattaacatatgcttaaggcaaccaagtcaaaaagcagcataagaatcataagtaaaacaaacaattctgcaggatttggtcgttctcataaaaggatcatttaaacgaagaagactactttgttagtttgcagaaatggaagcagagttcaaacacttagtctgaaggaagttaagccttgcagagacatgattgtgcatttgccttctagagtttcaacttttactcattttatatcagtagaattagatggtgtaagcaaagttgaatccagaatttgatgatatgcagattattccgtgggacacagaagcatggtcctgtttcttgttatggataacaaattaccaaggttatggatgttataaacttccacgttataataatttagattgtttatattataacttagtgactgtagcttgcactgaggtggaaaaaaacttgcatttcaaggaaattttactcatgtaaaaagaaaattttatttctccctctcactgtatttgtgacgcctaactacgcttggaaacacagtagatacatgggaaaccacgtccatttactaaaagacgcagaagcaatacctaccagctctgatctaactgtgaaattacgtcaacatgataccaaacatgctaaaaggcaaggaaaggagacaaagaaaacaactgaatttttttgacattagatcatcccattcactttgaaaagtgaatgcatccttaccaaccaagaagcaatatctttaagagagccatcctaatatatagaccattctttgcctgcctaaagtaagcagctcttggatctctatcaacttccactgtgatctgcatgaaattaagggaccaatttagtttatttaatcttaatgcttgcattcgtatcgggataacatatatcacatgacatggcaatatgtgcttacctcgtcaagtcttggaagagggtgcataaccacagcatgtttttgcatcacatttagaacatcttgatttacaatatacttgcctcttgcctcctcataaagttcaattttttctccaaatctttctttctgaatgcgagtttgataaaccacatcgcacttagaagcaacttccatcaaatcagcactttcttcccactccactccctttgatgtcagatagtcttttatgtcatcctatgaaaaaaaataaaaaattccataactcattttgtcatgtaattcccaacatcttatccttctcatgaaaccataattagtatttgcaacagttaccttcattttaaccacgtttggagagacaaaataaattttcacatcctgatacttggctagtaagtatgcaagtgagcgaactgttctcccattagcaaggtctcccacaagcccaactctaattccgtccagttttcctatctctctttcaatggtataaacatctagcagtgcctgagcagtttgaaaaagaaagagttttgaaacacaaaaataatatcatccaattaccacccaaactattataaatatagcaaaataaacaaacaataaataaaaagtcacaaaaattcccctttgtctgtattttctacaagaaaaacactaaagaagaatcaaacatggaatcatcttgtcaagtgtaaataaactagtaaaatatataaggtatgtacctaaagaataaagtataatcaaagaaaccttcagattgaaaagtccataatatattgttataattggctaggaaactggtgtgtactcaaaggaagctaccatttcaatccttgatagcaagcacctcactagaaaaatggaactccatttagatttatacttcaattggtttttggcacatttttggttaattgaaaataaatttcttttccccaagaaagagaaagatacaatttcttgagtcgaagtcttgaaggtatgtcccataaaagaattaattttatattcataggtcattgtaaaccccttctacccaatcaacttctcctaagaaattataaggagaaattgtggccctttcagtttcaaataccatgagacagcatcagcataataagggggtttgtttttaaaatttgattgggagtaatgagtcatggaaacaaatttgttaagtggattttccctgtgtttggaaatacgtttggcagggaacaaatcaggtcaaatcaacaaatgatgcaaaagttacacagccagtagcttctattcagatctcaaaaaccatgtccacgaggaccatgacacgttaccagacacacatagttatgcttccacaaaattgctcagcagcaaaagcttatctatcatagttcaatgctaattcatggttttaacaacaaggtggcagatgctacaaatgaaaatgaaatagtgcaatctctgcagtcaaaaagtagctaagggcaatagactcaagattactttgaaaaataaatcatcctatgataatatctacttgacattctatgtgaagcatcagaattataatctgtacctattgtggcaaattcctcatacctgggtgggatgctgtccagggccatcccctgcattgattacaggaacgctagcagttgttgctgctcttttggcagcaccactttcaaagtgcctcatcacaattatatcagtgtaaccttcaaccgttcttatagtatctgcaagaagtaaagttccatgaaacaccaattttagatagaataacaatgaaagaacccactaagtactaacaaaactttgcattgttaattgaaaggacataccttcaagcgtctctcctttagcagcagacgaaaactcccttgcattctcagttgtgagaacatccccacctaatcttttcatggcagactcaaatgaaagcctagttctagtggatggctcataaaacaaagtagccatgaggtaaccctttagcatttggctcctagatgacttgctttcaatgctctccatgctccttgcaacttcaaatatggcattgagagtctctctgtcaaattgctgagcctcaatcacatcatgaaggtgaaatttttgccccacagagaaggagggtgcactttcaacttgaagggcccccgccctccacagaatctcatcacctttatgtgaaagtttaacattttcaaagactcctgaatgcccaaatggtgtttttgactttaaatgatcccatggctgattgagcaaacagcatggagaggattttgcagccaccttgggatgagacacacccacatgcatagagcaggagaatagcaaagcagcagcactcattgtgttctattggagtacaagacaaagtgcttatatgttattacagaagcacacaaataaccattaattgcatactcaagtttcaaatccttcaactctcaatataggaagcaaaagggcatgcatgtaacttgaaaagatattggaaaaaaaaaacattaattaaacttgttttgagtggaatcacttttttctatgccaagaaacaagaggaatcacttttttctatgccaagaaacaagaagaatcacttgactataaatgtatgtgctttaaaaacatcgcttcagaatagacggcagaaaaattcggaccaaaaaactattgaagatgataacataggaaaaaaaaaagaggaagtatgatgaatccaacacagattttctagaaagaaataacgaaaagtttagagaagaaatagaataccgtgaggttatttgtggagagtgagtagttttgttaattttgaaggccgacaacggctacaaaacagcgttgcgaccgtcgtgcaagaaggaacaatgtgtgtaggctataagaggagacgacctggtttaaaagtaaacctttgttagggattgccactctcactcccaattttactatttgtaccctacgtgctttaaaaatgacattattccaaaaatactctttttaatgaaaaacatgattctattaacaaattagacaatgagatcatgtctccattatgtaagaggaagtgcaacgaaaaaaatattatcaacgaaatcatattttcattgtataattcttttgcactcttgtaatcaacaaaattatgtttatattctatatttttctttacaaatttttgttaattaattataaatataagttactttttttaagtaatacaattaattgtaatacaaactattattttttaattaagattaaattaattaagagacaacttacagtttttaatagtagtcaatgtcatttttaatagtaattaaattaaatatgatattaatttatatcataattaatttgattataattaaaaaggataatttatatcatcattaattcaaattttaataaaaaaggtaattcatatcacaattaattaaaaaaggtgatatgtgtaacgataatttgtatcataattaattcaaccgttattctttttttggattttctttttaaaaaagattagagtgggagaaaggaaaagatgataacaatcatcatttaattacaaattttcatatataacaaatttgttgaattttataataaatatgtcaacaaacttttaattgatttagtcaaagattatttttaattcatcaatagtgtaatttttttatcttgtacatgtttattaaacttcaaataaatccttaaaatttataataaagaataaataatacatccatcaagagtataaaaatgttttaaattgtcctttaatcgcatgttgttatgataagtttattactagtaaatatcttaaaattatattatagatgattttaaatttggttgatcatataggagctaaacctattatactcaaattaaaaatgtcccgtggttttgaagacttgtttgtaatttttatattaaaatactataacaaaatttgcttaaagaattgttaaccataatgcagttctttaaaaaaaaaaaaaaaccataatgtagttgttcacttgttcaaacacttttcctgcgtatgtacgtgaaaaaaaagcaaactaattttattgttttggctattttaaaagaattaaaaacatgtcatttttgtttgtacaataaagttcataaagcttgcaaaatgttttgttagcgatatatgctattgaacacaacttaaaaaaatgaatgccttattaagatttatctcaaataatgaaagattataatatagtgattcgtccgatgtaacatccttttgtatgcatgacattgacgaaataaaaatctctatacctatgttgaatatgaaaacgatcaaaactacaccaatttgcaaaagcaattaacgagtcttatgtattattgttgcaatgctcattagtgtttgaatgtgaactccccatgacagatgttatagctgccacaagagggcagtgaaattggggtctgctgtgatagcagcagtggctgcatttactatgttagcaaatgatgaagttgtgtccattccctgagactcatgcaagccagcaagccagaaagcttagtttgatcacacagtgccagtccaaatatttttggaaatgacataaacttatgagccaaaagtgggaataagaggccatgttggccctgtggtaattcactttgtagctgtaaggaattggttgcattatgagtgagatccaatgtgatggtgggaaatggggctgaggtcaaagagttgccatgttctgagagcatggaagtgaagcactttctaatatgcttggattgattaggccatctgagcttggcattggtccagaaagaagcattgaggcagctgcatatgttgtggatgccattgcctgggctgtggatggttatgctgcccttcatatgttgtgatcagcacacttctgtctacagcacacctctgtacctatgaacaaacataaatccactatttggtaaaccttgatttctctgtataatactcatggagtttaacaaattaacacacacacacacacacacacatatatatatattataaagtttttgtactatcaattaatcaaaaataatttttggtatgatatttaagatatacttattataaaagtctaacaaacttattatacataatattttgtgattgagtgattgtataaaaggtgttgaattatatgcatatattatttattcatgttaatgttagagacaaaatgtatcaattccttcccaatggctttaatttgtagccattagctaactggcaaagtttcattacccctcaagatttcttagaaagcaccagctgatacaggctttttgatccctataacattcacactctaagctgtatatcattttccatgcccttaccaggcacttttgggtagcgtatgtccccaaaaaaggagagggatcgattggtaagtacaatagaaattcttgtataaacctaatatacttgagttgggtgtgcattactgataattaaagtacagtattattaaataaatcttttgttcactaatgtattgattataattcaattctttgttaatttagtgcactcaactcaagctaggtaaagtgtgctaaattatattaaaattttgcaaattaagttttaatttgtctttcccccaccagaaatgtcttgctagtttcctaataccgtaagagaatttcctccttgctttaattagctagtctcagcagaaagaacaatttaacgcaaattaaagaaaaaaaatttcctagcaagagtgcatacttgtttccttactgggcaaccagtactcattgtgcaacgataataggctcttggaaaaggatttcctttcgccctcttcttcctatactttcgccattggcatccatctgcaatctgtaataaaggattcatccaaaagaaagttaacacgtaaattttccatgatgtattttcaagaaacaagaaattaacgtgtgcaaacttcacattagtaaattacatcccctttccttagaaattagaagtcatcgattagctagctaactaggctgaatttgttaatgggtaaatcacatgatgttactatatattggagatgatagagttgcatgtcaattttactttatttatataatttactaaccattgaagaaaatcttgctcgaactgacacacgagctttcttgattgacatgatttttgaagctggatccaatctaggaactttgttactgatcaattcttggtcagcgtgcctcccttccatgcattctagctttaatttgcactttcccttccagcagaatccaacttatctgtctccaaaacagcaatatctttgccatgtcctaactcaaccatgcttttgcttcctctcagtttcccctctaaagattgctgggtatttggctcatcctcgtcagcaacatccatgtcttagaatgactttggaaccatatcttccattttccctatcactccgtaattctacacaaaaccaaataaaaaacaagtgcatacatgttttcagcattgaatatatgatcaaatgccagatctattttttggaactcaataaatttattaagatggatctatcaagtaaactcaaatataccactacttatttattaagttatttgatattcaatgttataaaaacaaataaataaattaccccatgactatgctgcttctgcgttagcttgacaatttgcatgcgtagggcattgcagttattgttcacctcatcaaccaacactcttaaaacttgattttcagcattcatttggtccaattcagttagcaaagctacaaactatacccataggaataaattaatattaattactatatattcatcttaaacgtgctacctttttgataaatataaatcaaacatatataacatatatacctagacacaacaaccaattagggtacctcgtagctcttatcgtccatagtttccaatgccgcatcttctttcgttgatctattgacaccagtatcattcttcgtaagaagatctgagctggtctataaattaacacaacaagaacataattaggtgcccatatatataattaaggtaaaattacaattattaaatctaaggaaatatttaaatgtgagtttggctacatatatagtacatacatcaacatgaaggtcctccacactttgatgatcatcatcaatatcatcatcttcactctcctttctcttctgagcaaaatcaagctcatccatgacaagtggtgtccttctaaacgacatgactggatcagaagaattactaccgttcacaatgggatcattccaagtgggttccatgttgattatatgtatatgtatatgtatatatatatatacactccctattatgttacgtagtgtgcttggggagcaagaaagtttttgcatgagtatcaaaaaggactcacgtagttgtgtctacaaattatttaaagggtgaaggaaaggagtgagaaggggtagatgtcagagatagatgcaagggagtcggcaacaaaaaatgggttttgactaaaaccaaatattatgtgtgagaatatataccaagatgcagtagtgatttcagaactgaggtaagatgcccacgtgagtgatttctaaaggagaaaccatatgaatggcaatgagagagactcttgacttagactaattactatttactagggcttgaaatgttccactatatgtaatttaccatttaaagattaacaattatatatatataaaaatgaattgaataatttattttattttattttttaaaataatatttataacaatgaaatatatatttgtgtgtagaaattttttactcatgtattatgaatttaaatcacatgaaagaaaaataaacaaccacaccataaaattagagatattcatggattgaattaaaataattttgaagagaaaaataatttagtttaatagcttcagttttcttaatttttcatttaattggtttaatttaaatcttaaatccagtttaatacagtctagagtgctttggattgaattttttttcagttgtagtcttactttacttttctataaataaactattaaataaatgataaaaaatattaaacataataaaaaatgatttttcaaaaaataacttaaaatgtcgttcaactataagtcattatatatcttagttaaatatattttttcataaataagtgtaaattatatgataattttataaatatataaaagtttagtttggattgcatcaacattgaaaaccaaaactgaaatctggtttaattcaataaaaaaattagttttttcgtttttaatttgttcaatttttagtttattcgatttattagttttgctttttcagttttatttagattggaccgatctatctctgagcactcttggataaaataataaaagtgtatatgtataattattaataacaaaaataaataaataaataaaatcttctataaaaaaatgggaaaaataatgggtcaatccattgaaattcaacattattttttattttacatgttttaagtttcaactctctagaggacactttaactcaaagatcctcaactaagtgtaatgtttatcgccttgtcaagacaattgatattttcattacagtaactgagtaaggaccatccatattccataacaaaagatgtccatcgttgacttttccaaccatatattgttatctttattgggtagagttgttttattttataaaaaaaatctaacagctgttacaaaacgttaatagtgatttagaaagaaaaaaaattattattttgaaacaatacattaaagtcaaccatgtaaaaaaatgcaaaccaaggagttaaatattattaaacaagggaatagataattttggttgccagttaagtggcattttttataacacgccttttctttttatgcttaacgttaagggttcttttaattaatagtacgcttttaacttatcaaaagtatttgtacaaactacaggacattaagccagaattcaaaaaacataatttgtgtataaaataagaagtgtttcgtttaccataaaatttctaaataaaataaaaaactcttattccattatgttcctttgcttttcatatccttcaaccaattcaaacagccaataaagcaaatgccgatgagagcatacatcaccttccaaaccagattataaacaagtaattgtttaaattgcaaattggtacgacagttgatagattcgctacactattgaatctgtcatatataagcatacatcattactacacgttgttctcctaaataaatactatatatctctgttaacactaattactaatcctaaatgtacataattatattatgtcaacatattaaatttacattatgcctacttgtataataggagcacacaatactaaatgcactctactgaccatcctgcatatataaccaatgctccaattgactaggtggggtaaccctcttcctaattaacatttcaacagtgggacatgttctcttccttcctcccctgggccttgacctgaactcttcatcagcttcttcaaaatccccctgaagcaaggaaaattatgagcaagtcaatgaaaaggcatgactatatgacaatatcacttataagaaaaccttttgcacaaagggaatagaaggggaaaagaacttacaagggtaaaaacatgtttagaagttttttcgtgattatctcgtacatgtttgtaagcaaatctcatgccacaatcaggaaaaccacaaacaaaaggcctttcattaaagtgcacagccttcttatgcttatcaagattagatttctgttgacataaaaccatgaacaaattaaaagaaagttcaacttgtaaccaaacagagaactcaattatagtatactctgattagatttaagaatgaggagtcttactcttgagaatgtgcagctgcaacccttaaactcacattgaaaggtctctgatgaactgccttcgacttcatgtgatcgaaggtgacgcttaatattcttcttcagttgcttagtcccacaaatgtcacaggtcatatattgatgggaggatttcacatgggcttgaaggcactggacattagcgaaatgtttcatgcaactaggctctaagcacaccacatctactgactccaacttaactgcagaataaaggctttcttcaaaattgcacccaacatctttcactaatctaaataaacaagaaccttacaaacatcccatggaaatttaactaactcaaagaattacaaaaggaacaaaacctaccatgagaatcttcatgtttttgtagctgtgatgcatatctaaaaacctttccacacccaatctcgggacatgtatgctgtttatgacttttgtcactagtagaggtagaactgttgtcatgaatctcctcaatgtgtcttttcatattgctttgcaaagagaactcactgttgcaattctcaacagggcacttaaaagtctttccttcatgctgaagaaggtgccgaatcaggtggtccttccttctgtaacttgcctgacaatcatcgacaggacacacaaatggcctctgtaaccattggaaaatactgttaaatccagaaacttacacacataaaggtatcatgatgctctgacaagaacaaaacacaaataaacaaactgccaacctcaatttcgaacagagcggtgaccgaggcatccttgatggagcttcacaggaggtctccctacctgatactaatccatcaagttcatatacgctgcctcgtgcattttggagttctttttctgggatccaatgcttcacactattaatccataattttccaatgattttagaatcttatagattactatcctgcaaaatatgtattttcagtctatatacaacaagtaacacaatcaattcacaacaccaagcctgtcttccacaaataaaatgtttctcaaggaacacgacggtctataaaacatacttagtttaagagtttcacttaactgaatctatgttttttcttaaataataacaatatttaattgaagagtccaaatacctcatttgaatgacttagcatgtgctgcaacaaatgggcttgttttttgaaagtggcaccacattcctcgcaagtgttggatttcgaagcctttccttcgggacctctttcagctcttgctttttcatcctcttcctaaaaacacatcaaaagtaaacaacaaaaccacacataaccctacataatgatctaattcaagcagggttgcttataaacggtttgattttgcagaattagaaagaagggtaccttgtggtgcgaattgatgtgggaggtgataagggtttttttggacctgcagatgccgcagtactcgcagaaatagcgtctaatatctttgaatttgggcctttctttagtttccacggattcacacatttttatggtgaagagataaagagaactattggagattgcaaatattcgatgcgctgatgagggttttccgggagagtgaggactgcgatgtgcgcggcggcgttgtgaagctacaaatgtgagtgagagtaaaagtaaagctagggttctggacaacggaggatttatatagtgttcccatacgatgtcgtttgcatagtttaatgcccgccaaataaccaactatttattaagttataatatatgataatactttgagtaaaataagaagataagtattttaaaagtgagtctaggtcttaaattttaaactgtccaaaatttccagaattttattttattttttcttccaaaagtcctaataatttactcacgagattataatattttgtttgaaatatatcaatttttttgccacatgaaatatgtccgacattacataattccttgatgttgtatttgattgataaaataaaaatagaaaagacaaaacagaagaaagagatcaaccaagtactggtatatatttgttttattttagtgatttgaacataaataggaatgctaaaaacatatttactaaaaatattatagttcattatatggttttaatattccaatttaactaatttataatcaatatattttcctgtagttatattacttgtttcaatacttacttttaccataccatcttaatcataaaatttatacgttatcgtaatttgcaaaagaaaaaaaaatcaaattttgcacgtttattattaatttttacctaaccgtttcttttaattttagtagactactctaaatattattattttattattacgaaaaattcaggatgtttccgttgtagcaatggactataatattaccaaagaagttaaagcaatacaattattgtcagccccatatagcttttacaagttagccatcaacatggctcgaattttggctctaagctcatcagaaacatcagttatttcaggtgattgagatggtgcccttggattagataatccctcagaagcctccctactagcacgtccaacttcaccacttactactgacttttccgatttcataattatctccccctcctccagctctctttctctttcagcatgagatctgctcttatgccctacacttctgcttctgcttcgatgcctatgctcaccatcagatgaactacaatcttcattagaatggcaagaatgtctatgctcatggtctgacaagttctcatccctatgtcgttgtttggaagagtggtgcttttcatcagaggagctatcatatttatgacgacgatgccttgggcgatgatgttcatcatcagaagaggagctatcgtgcttggtccccctgtaagaatacttgtctttggaggaggaatgtcttctcttgtgcttatgcctgtcccgattgtggtgtgaagtacgatgtgagcgatgttttttcctggatcgtttatgatcccttctatcttctttgttttcttcttcttcctcctcttcatgtctactagatcttgagcggtactttctttttgaccggcgttcattatcatcaacagtaagtttctccttagatttctgacttttatctgaattattatcaatagaaagattctcctcagacttttgacttttatctgaattatcaacatcaaatggaacagaacttccttccctttctttacccacaagattcccagtctcagcatctgaacctgaaactccagagcctggtggctcaactgataaagctcgtggcagttcacttgctccaacaccacttttaagcatggctgcaaacatctttgctcgtttcagtctctctgccttaagcttttgctctttagtcatgtgaacttcagaggagtccgcctcacctgctgctgccatagctactttttctgcaatagccttggcaacaggggcagaagcactagcctttgcctttacattcaggttttgactttcaacaaaaccttgtggttgaaatgaatacagactaccagtcccagagctggacaaatacccaccatcacttccaaggccttgaccactaccacttgatgtcttggtaagaacttccaaatggggagttttaatacccctagtggcagcctgaagaatagctgcagttgctgctgcatccatactaattgtgttttgagcttggtcttttggaattggaccttgatcatccttcttagacttgccaataatcatcttgaacttttcttttctgtccatgtcatatggtagatcagaagccatagatccatgtgaaagattgtcactaccttcatgtacagcagctttattgtcccctgtacgacctgctggattgtgcttctggtggcccttgcctagtaacttagactacaaacaattaggaagatcagtaagtagcagctcaaagtcaaaattaacactaccttaatcagtcccaaataattcatagaatacacaaggtgcaaaaaatccctccagaacccaaataaaataattaccaaaatttgaattccatggagaaggaaaatctttgaaaggcgaagttgaataaaaataaccatgactgcttcaaaaattcataatttatcacaactacatggcaaggcattatagctatataaagcatacatgccacatgcatacaaatttgcataacagacagaaatacaaacatgaccaatgattaattagaataaccaacattagggtactgcagataagtttacaggtgataatatcagtcaattaaattatgtttttgctttagaggggagggaagagtagggtagaagggaacaatttgaatcacattaattgaaaattaaaaataagctaaattttaatagttctgagaaacacacctcttcagcagtttgaagaactttcagatagtaagtatgatatcgattagatggcagaagaaatgggaaccttccatgaggtcgatcctgttctgccagaacagcctcaaattgttttccattttttaagatgaactcaactatcttctctatagctctctttaaatcagatggaggttcaacaactgggagttcaatcttagcagtactcgttacagaagtttgcgacttgttctgtgcattagatactgaatccaagccatcacctttagctctagctgtggttacagtcttaacagtaccaatagaatgattccgctttatgacaggaactttttctttcaaagagggtattggatttttagaaatgcttccatccttcttggccacatctgaataagattctgcctgatctattcctggagaagtataattactagcagcatcaacagctccctcacattcttttttctcaacatcacaagtattctcagttgtaccatcctcgtcctctccggatccatagacagatccaagcaacgacaatgcaccacctgtttgatcaagcccctgagtcctattcatgtcctcagttgagcttccatcatctttgtcaactttcagaagttcttggtgatcaacgagaaacctaaaatatgcatgaagatgatgatcgggcatcaggaatccaaaagttggattgtctccttgtttcaccctcagaatgatttctgactggcttccatgtttgctgacaaatgttgcagtccttgaaataatctgatgtactttctcatttggaggctggaaaagaaaaacaaacaaacaaaaaaatgtttcgtcatcaataaatgtgaattccaaaattagtacaagtataaacttaaaaagggtctagccaagcagaatatttagacacttgtatcctactaaacaaacacaagacaacctcacaaatactttgataatgataaagatcaagaaacagaactttatgaagacatgtatcattccatttgctctcaagaggtaaggaatcaacaaatttctatcatcctaatcccacctgcacggccccttctcatgacatcaaaaggaaccaaggtgcctgtgaatggctaccttgagtcacaagaactccgtttatgctccgagcatctgaaacttagacattgtaagccttagaataacatatgtaccctagacaattatcacctaatcacattggttaaacaatgaaaggtcaattaaattagtaacatcggaaaaccacacaatttaaagtatatattaagacagaggttactcaccaggttattgagtaggctttctggtactgggaatttaggatgaaaactagactcagtatcattgtcctttgtctccatggacacattagaatttccatatgaaaaggcgacagcatgaaagccagttgaactcactggatctgaaccataatctaaacacaaagaggtgatattcttcatcagaatcaaatataatataattctcaataacaacaaaaccatccagcaaaaacagtagttgcaacacaacgccaaacttaaattgaagccaggtgaaaacatccttacttgtattcagacacgggaaccgtagcaaattaaattccaacctgcaaatgtggagcttgttgttgccggaaaaaaaaaacactctgacatagactcaagtggaagttggattgttccaacatgcacggaaaaaacatgtgttttgctagccattagccaacaaagaacccacgatcaactagttgccccaactaaatgtgatgtctaaccaaatatatcaatgtgtcaaaatgatgagaacaaattgaacaaacttgatagacaaaccttagagaattacccgtgactgattattaatagcccttgctctatacacacatcacaatatgtcacacacaactcaaaatatcaaagccctcattgttacaaaaataaagattacgaaggcaagcttttttgttaaaccagaatatgttctcaaaacctttcatcatgcaaggaaacattctagctaaagcccacaaagaagcaacaaaagctttatcttaaaccgctgagctcaatcaaaacccatagtttcactcccaaagtttaaggacttcctcgaacctaattaaacagaacaacttccatttgattgacttttctcaccgtggcctatataaaattaggatgaaccttgaacactaacaaaacttcccaacttctctccagggaagaacataaaacctcatcaaaacaaaatcactaaccaaagctcccatagcttcttgtggtgaaaacataaaacacaacaaacaacagagttccaaataaaacagaaacatatttggggaaaatcaaccctaagaaagggaaggaactagaaagtaaaaagtatagaggaattgtgtatgaggttaccttgtggctgttcgtcgtcgggagaagaggaagggagatcgagatagcgctggtgatcgagatcgggttcgggcggaggagggcggcgcttgaggcgcggggggaggggagcggagagaaggtggcggacatcgtagcggtcgatggaaagagagttccattcaaccagagcttccgctgagttcacgaacgccgccatgccgtcgtcgtcgaacagcatcgcgtgccgccctgccacctccagatccatcgcttctgcaacttggttgattatcaaaacgcacaatctctctctctctctctaaaatatgaaaacgatgatgattatttgtttgtcgctatgggatttgaaaattatgaatgaacgaattttgggtaatgacccgtcggaatgtgccctaccggctacatctatgcacagggcccgggttttagttggagctttgggcctttggcccattcgtaaatgagttgattgtcggctttctgaaataattaataattaataacaatgtgtatattctgcttcaaaaatacaatgtgtataaaacttttacactctcatcagtatatttaagttcaattctaataattagtttagtctctcttaatgtagctattctgactatgaaactgatgtagttagttttaatcaaatatcagaattcgagaattctacagtcagatagagttttcagaggtcaactataaccaaaactacttaagtagttccactgccagcaagatgttgagttttgtccacactactaccatgccaatttatttagcgcgagacaagtttggtaaacgattttttcataaattataaagtaggaaattatgatttttatgtttaggatacgattaataaaaaaaaaattgtcagaaaattatgatttttaagaattaatttagttcactttcatgtcaaaacacattcttaaggtgggggacaggaatctaattttttgaatgtaaaaaaagttttaactacatattttacataaatatttaattatcaaaaaatatattaagactaatcaaatacacattcacacaaatcattattttatgaaatttacttttccagaaatcatgtttcccagatacaaatcaaagataaaaccataaaaaattatttaaaattagtaatattactatattagtcagattacaaaatggtgtgcacttaatcactattgagtagacatgataaataacctcatacttgtgagtattctctagaacttatcttgactttgatgaagaatatctactttaattacgtattattcaattttttaaagtaaaaataatatcaaattatattgtacatgtcactattacatttttttataattttttgtcacaacatatatatatatatatatatatacacataatattactaattttataaagattttattgttataattttcaaaaatataaatcaattaacttaataattaaataaaaacataattgaattctttattttttatcttttatttatttgttatttattatatttgtatattatttgaattaaaacataattaaaattttaatatataatttatttataaatatatgtaaattaaaattataaaaaagagtataacaggttatctacgatgataaaatccaatgagaatgtatgaaaaatttaaaccctcttttatttccgaatgcgtatcgcattttgcgagaacggagaggcaaatctgtccccgagcagcgccacccccattgccatctctaattaagcaaatatacctcattttgagttcgttctgcttatttagatagtatcaaagcttttcaacgagaactccattgcacatcgagtaattcttataaccaaaagcctcaaaacttcgacattagcttcaatagaaatctatcgtctgagtgactaatcagcaaattctagccaaaatcaaacgactaactaccatattcatccaaacaaaagttctactacgataatgtgacgctagatctttaatgtcgaacaataaatacaaattggtctgataaaaagaaagaaactatgaattcttttgatccacactttgaagctcaaggagtgatgcaacaatctgattgattattggattgcttacttagtagtctctgccttgatcggacaaaatgtgatttacatcagaaatccaagtatggcaagaccttgaatgtttctcgactctggctaacgtgcataccctctacatggtacgcacggtgcgaacaagaatgttttaaaatggttgtaccttgtgattttttttttttttttttaccgttaagatttaaagagaagagagtggtgaggcggtgatgaccatggaagatcttgcgttgccactgaccacaactttggagttttttcggtgcgatttcagcggcagatctgacgcttttattttattttatttagtatttaagttttgattcttatttatcgtaaatacttgttttatgtattgttgctgattttttgtattggtttctttgatttttttgtattggtttcttagatctgaatgttgtacgctatattcataagaaaatacatgttattatagatttgaatccgaagatctgagtttaattttcgtttatggatggtggttttatttatttatgtgggtgtgcggaagaatgatgatggagtgatggagggaagaggaggggaccgaagaagaagggtatttcgcaaaatagagaaaaatctaatgtagatagttctacagtagtctcatttattccaagatctaacggtgtaatatacacgcaccgtgcaacccattctaaaagtagtattcgcatcatgtatagccattaggggtaccccatgcaaaaagtcgccatgtttttcacatggtacttttgtttcgtgtatttggaacaacaagaactgtatgctttcaaaaggggatcgtcatcagtaactgaatgttttcactgaattaaaggtactttggagaattaataaagtgaactcaatccgtcataattttgttagatgcagttatgctagccaaaattaggttaactattcagttaggaggaaaatactaaggtcaatagtatactgtagaaaatttaactttatgccccgtttttagttcgttcacgatatttagaagtaatacatttgattcctagaggaaagaaaaagaaataataaatttgcaacaaataagccccctcgttcaaaataaagagaaataagagggagggaaagagaaaacctcgttccttacccacacggagaaagaacattttcaaaggaaaaaaaaacagagaaaaataaatagatgaacacaaatcatacaaaagtagacaccatagtccctacagaagttggcgattgcttgtttaatagttgaatggttgactggaggtatctgtctttggcactcaaacatgacttggcagtttcgaccagtgtaaggcaagcagacaataactcattgtttagctgtcaacaatcaagaaagaaaccattattagaaaactgaagtagaatctgcacatgattcagatacaactctgcaagttccaagcaaccaaattcatttggaatttgtggttacaagttacaacagagtatgataactttcaacaaggattcatcccctaacataatactaggtaaggctatgctaaaaatgaataattcaaacaagaaaatgttacgaattacaacagaacattatcatggggactcataagaaaacgcatattctgacttcctttttctgttccattcaatcattaggatttaaagataggtttaatatgtttgttaatccaacaaatacgacaaaattagattttaatccctaaaaaattataagttttggcccttatgaattttaagagttttgaaaatgattgattcctgttaccatttattgataacaaatgtatcgagaaagtgatcactgttgtggaatgcatagatgcatgtcaggccatccttaaataagatatatttcacccataaggccatacaagggtgaaacagaacaattttgttgaacctgagaaatgaagcaaacacgtatttcaattagttagttaggtgtctattagtgagggagtggggtaggttagttgggtgggctaccagggccgcgatagtgaaacaaaaaaggcatattgcctataaataataaataaagaggggaggttgagagaaatcatcttatcatttgagaaaggataatttgaatcttgaatatccagggaaatagctcgttttgtatcttcaaaacctagccaaaggctgctaccacattggcacagcaatcgtgatttagggttcatcaataaaaattcatcctttcctttataattatatactgaatcggtttctgacaggaacaaggacatttcatttgcctaccttttataacaaaatgctccaaactatattatataggtatagtgaacaatgtttattcataaatttctgtttatagttaaagaaatattaaataattaccatgaatgggattaatctcatggggatgccggggcagagaccatatatatacatacagacacactacaaaccagttaatgggttaactgcctgttgatttaaatacccatttgccagggtaggatgcctaaattggaaatagttttgtaatgtttttcaagaatttataaattgtaatctgagtcctctttttttcctttgtactttctccccacgtcaatgatggtgagaactaagttcaaaacaactacagagcagcttaccatgaaagatgatgcaatgcaattgcaagcttcaagtgccataattcctcgagcagcctttattttgttataataaatcagtattattataattggttaaataaatcaaacactattaattcagccaaaatgatgatacctgggaaggttcttgttgaacggcactaagcaggttttcaagaacaagtttagacaaagaaacaagctcttggttgtacgatgaatcctcatagtataacatgtcattgcctggaatctggaaaggaaaaaaatatattgttttgagaattaagatacaaaaaccataaaccataacatgtcaggaacaccttgatttacaaaaccgtaaaccttacacttgttatagtcagtgcaaagtaaagggaaggcaaattagattcactaacaggctcagaataattatactacattagcttaaccctagacctttacttatactggagctatgaccactaaatgacacttacatccactacttggacacaaaacaataagcaagacttctctaaatactcttcaacttcaatatgttttgtccattttggagtgaaagagtagatatgtcatctttattccattaatgcaattgaaaagaggaaatgcaaagctataccacttatacctgtgcatttgcatgatatggcagtctcttttgtgataaagttgtcaataataatatgatagcagaaaaaatttgtgtcctcatttttggttcaaacctgcaacggttttcaattcattcatcgaacaagatgcacgaagggagaagagagactaaaacaataagggaagtattttggggggcaagaagcttcgattgtgatatatcccaaagaaaacttaccaagatcgggagctgatcaatctaaataagctatttgggaaataggtgactggtagattaagagtaccttcaataaagttgaagaaaatcatagtaaatacatgcattcaaggaagaggtaaaaaggaactagatctctaacctagtacctatatatttctatacaaatcatagtaaatacatcccagaaagagagattttgaagtgtctatgtatattaatgtgcaaagctgaaacaatatttacaacctggaaccataattaagaagccacatagctttctaatagatgaaactagtccttcaacatcagttggagttcggaagcctacaaaatcaagcaaatcaacagtcaattatattataagaatgctatcgagagtacagacaaaagtcattttttagaaagccatggtggcacaattaatgtattttaaatacattaagaacaaaaaaatgctgatacaagcaaccaaaagaccaaagagaatgatgctcaataaaaacccctcgcaaaaatatggcaggtgtctttaacatattgtggcatccaattttgtattagttatttctaagaactattgctaggatacttgtattcaagaagagattagtgttgtttaaccacatttcctttttaagttctaacttttacgcattagaagccttgggtaacaataatatagggaaaatgaccctaaagtttggcactccaaaaaatttccatttcagttcgtatattgattgattaagcataaaactaatttaaccaaggatctacctattttagctctgatacatcattttcagttaactataaatatatattggattgctagtttctgactgggttaatcaataaatgaagtgaaatggaaaatattttcacaagttacacctacggatcatttagcattgcattattatagaccatgcatgtatataggttctacatcaacatcttattggagacttaactgtataatataacaatttccatgttagcttttaagctctatgttataagaagccccaatccttgttgggttttaggaatttgaaagatatacgaagttcataaatggcttcaaatcataagatattcgacgaagaggataaaagagaaaataaaaaaataaaaaagatgctcaaattattgtattcaaatcattagatactcaacaaaggggatagaagagaaaaaaaagatttacaaggttcataaatgccttcaaatcattagatatttgaaaaaaggggataaaaatgaagaagaaaaaatgcccaaattattgggctttcttcaacacaattgactgaactgagtcactaaaaaatataaaacaatttatagtttggacaacatgaacaagttttggttgtgaattgtgataattgttctcaaaaccttttaaccactaccgtttcatcatagcacatagaaaattagcattgaatagatttcacaaaatagacatgccacaagtaacaaatgacaaggattcaatttcaagtattggttcttagtactttcacaatgcatcagcaacaaatttacaggttttacatatcaactaaccatcaattatgtctaaggtatgcaaacagctgatcgctgaatcaatcaatccatctgaatgagaaaccaagccccctaagaatgcaacctgaaaaattcaaactatgaatccatgaaaaatataaaagtagcaaaaataaacacaactttgatgtgtcaagaactgacatacctacctctgcagtttctagaaaaagatcaaactgcctgtgagcataaatagaaggtattgtgacttcactaaatgtgacacaggatttgacaaaactcagatgtttcttatcacatttcaaagcttgaattgctaaagaattgctagagtgaacaagagtttcctgcaagaaagcatgacaactttatcacttataccagggcattttgccacaacttttaagaaaaacaaagacaaaccttaagctcatttaatctaccaaaagctcctcggcaatcaaccagaaatgctaaatggctttccatctctgttccatattctacctagtgaataaggcaatttagagtcaacattcataatcatggcaaaaacattaccacaactaaagaaagtgaccatagagacaaataatatcaaaaggaacaggttaccatgtgcacaaagcgagctattgaacatgccacttggccatcatcatcttttacgttcataatctctatattattatgtagtgtcagagaaatttcaaaaagcaactgtatgctcgtcggatcactaatgcgaccattcctgcttaacaaataataacagataattccatggtaatgaaatgaatacttaataaattatactcaccaatcagaaagatagaatcaagagtatgttgcaggcagctagcatattatgaaacaaaaacatttgaaaatgcaaaagtaaactctgtggtgtggatacatggttaagttttgattcaggatctggatgtaatttcccatggaacttttttgaaagaaaaaaatcccatcaattttaattgggtttcaatgaccttatttaatgttaacaaagctgactcaatgtcttagccttatagcagttcatgatttaagaaaatagaagttcaaataagatgtatttttcaaaattagatctaagatagtagacttggaagtgtaagtctgtataagttctgtgataacaattatctacgttagtgcagtcactttacagcagcttttatgtgcaagtacagcctatacaggggatttaggagaggaaagaaatgaatggttatatgaaattgtacaatgttagtaggaattttggtgtatttaatgcagcctaattttggatggtgagcttggagagaagaactcaacttttgagtggatttcaaatatcctgtgccaaaatgacttgtttggatatcaaatccaaagaattttaaaattgaggatatttttctggtaaaatgaagggatttcaaaatgaaaaaaaattgaaaactctcaccccaaaactctagtgcacactctatcactgttgcacctctctcccttttcctccctctctcgtatctatgcctctctctccttttttctctttgacaccactctctcttccacacctctctctgtctctccctttctcttcaacacctccctccctctctctcctatctctctttcgcgcctctttcttttctgcctcttttctccttttccccctctctctctccccctttctgacatacatcactttccctctcttttgcacatctcttactattttgcacctctcccctcctctgcctctctatttattcaacagtacggccttacaactcaaaagaaaatgttttttttaattgccacagaagtaaaggaatttgttaaattttaatataaaatcattcacatttcttcacctaatagcttaaattttgggtatagttggttcatcatatgatatcaaagcctctaatgaccaagcggtctagaagttgatccttgtcacactaattctaataaataaataaatgaatttcagcacaagataagtgaacttgcaatgttcacacttcaagccccacagcctctggcatgtggaggcatattagacatgtaatataaaatcatttatggtagttgttcatgacagagtttgtacacaaatatcaatcaactcaattaagtaacaaaagttaaaaattcttattcctcaaactctcaaagaacatacatatcatatacaaactagatgttggaaaactaccttaattgcggtcacccctagcccatctcagttgcagcctctttgagggctgcctgaattacagcctcaagggtgatggtttagtcccacatcgactagtgatatggacaagttaatgtaaataagtggagggaaaccctcaccttactagcaggttttgtaagacttagttaggctcaaacccaaaattctaagactagagaaccaaggtatgtcacatgggagtgtcaataagggtgatatggaatgaaaggagtagagtaaaacaaaatgtttgtgataaatggtaccttgtcgccatattaaggatatgcaaaaagacaacatcctgtgacttgccatacattacatctaagatttcaggaaaatgatcctacaaaataataacaacaaaaacccaaatcaccactagtatttatagcacatgtattgaagaatgaatgataaagaaagatgtaaaaagaaagatgatcaagtacaacaagatatgattaggaacataccagagaaaacacatcttccagatgcttaaaatgagacagaagcttcaccacaagagattgcaagctcgacatttcatcctctgtaactcctttattccaagtacgctttgaaatgccttccaaaatgattttcaaatggttatcctggcataaacaattgtatttagaggaaagattacaaaagaaaatattaaatattattctagtcatttgaaagtaacaggtatatcaatttgcaactaaactttgtaattggataacaattaatccatcaaggaccagagtttaaatctcaatattttctatggaatttctttaaattgtcatatatatgtttgactgacgatcgtctacttaaagaacataccaatagatagaaagaaagaatgcaaagaaaggaggataggctattgtccttgcacaaaaaagcttagaaacttagttccagaatttttagttatagatctcttgttacttttgggggattggcttgtacttagcttccttatcatttcagttcacagtacccttaccctattgactatttaatcaagacaagtattattggtaattcattcagcactaaggaatcaaattcactaccttcttgctaaaaacactttgccattaatttgttccaatatcggacatcaagcttcattcagaaggagcacgttcaatctctaggagattggaatcaagcaagttgtaaattaaaaagttcaaagcctgagatttagcaaatgggagttactgggaagcaacaaagcttgccagcacacccactcaacctacaaaactataatatgtcgatataatgcgtagatctagatgatgacgacacaaatgccaaacattggccttgtagaaaacatttgggtaatataatgttaactgcctagtcaagacaagcattagttgctcctaaagagtttcaaacctcaaacctctccttgctgaagacttacaattactcctacttccttttgtatctctttttttaatttaattttattaaaagaatttattgtgagaagaaaggatgtgattatagaatatcaatcaactgtgattatcaaattagcaacaaaaggataagaactgcattaaagcctagcttaacctttgaagaagttttaatattgatgtagatttaaaattgcatagatagccagaaaagaaagttgtgtagcttagaacatgaatcctattgagctcactaaattaatcaaacgtgcaccataaaaccaatgccttaagcagatagaaatttcagtgccatggtaacttggtaacatttaacacctgtttatcacagctttacaagaataattagtgccactgttccttaagcaatattgtcagttaaaaaatatctaaaccttagcatttaatattttaacagtcatagacataaaaagatgattactacaaatgcataaatttcagccaaaatcatctataccatgtaaatggtcaacaatttagtgcacccaagtgacccaacaaagaagatacataatggcataagaaacctttttcagaagacatggagaactaataacagtctgattctactcactcacttgaacttaccatctgattctgaagaataagatcagtataagcatctacaaccttcaggtatttgtcaaggctatcatacagagcaataacctaaagttgcagccaagttagagaacaaatgaaatacctgaaggaaatactgacagttgaaaacatgcttacaaatgaagtccatactaaatcgcacacattttttatagaggtaaaaattatcatatactcaaattgaccaggagtggagagcatagatgttggataaattaccaaaaaaaatatcttgatataaataagagggattactggtatgttaaaaattaaaatcggggagatttatgtataaacaagtcaaggtatatattatttataatatgctaaggggaagagtatatgattgtttagctttcaattaattacatagaaggctagaatcaaccctcaattatcaccttaccacgagaggaaacaacaaagaaaatacacaatttcccccaaggtgtagatggatgaagagatgaagatttaagaagaatatatgcaattgcaaagaacctaataatgtaactctgaaaggatgcaagatggactagaattttacaaatacctgaataactttatctaacacagcattgacaatatcaacagaggattttctttcgtacagcctgaatccaagcaatctgtaattcatatgctgtatcacaaaaaagaagaacattaaaaccgcaaatgggaaaaacttaaacgaagatgcctctataataaggtaaaatggtaaatactttataatgtgtacaagaagtatccagctatgatagaaattgcaaaagtatacctgatcaaaggaattatccttgctaaattcaatgagatgaaggatctgcacgacattagaactaactacttctatagggagttccttcagtaaatgatgaagaatgattgaaacactccccaaatccagttgattcttcatcaatccaaactctgataaaacttcattgacttgtctctttagcacagttagacatacttagatcagcataaaacataggatatagaggggagaaaagcagggaaaacattagcaaactgactttctttttcctactgtccagtttttgaaaagataacgacgacaataattcttcatgaagattaagatataagaattgagttttcattataataatgagaagaaccccaaccatttagctaattatatgtgcatacacctgtttcatgaaatttcaacctgcaattccactcccttgaaatgctcatggaaaattcaaaatagaagagcaaacatactaatcaataaaatttcaattatacacttttgtataacaagatatatggaaatatgatcatatataatacatccaaaacaagtatatttttgaagagaaacttcatcacatacctgagacaacccagtaaatatacacttcataatatactcaattgttggttccatcagactgacttgcaattttttgttgagtttaacatttttctgagttctttcattggctgacaagatttgcatcaaaacaactctgatgtcattgacacatgtaacaagatagcctgttccagttgcacaatttatgaaataagttttatgaaaataaacatgagaaagaagtatataacagcaatcggatatattaaattcagaatgagcaaagtcagtgacctttgcatcccatttcagaaaaggagcaagagaaaattaatcagaggcaactaagcactgctatagagcacaaaatttcatataggaaagagtatgaagcaataatctagattcattgattctgttttatctgaataactggtacaataatgtgttaaccagccgacttttcacattctaaacaacttttaaatttggaaatttatggaagaaatacaagaactttaaaccagagtatttgtgactgtactgacaccaaagagtatataatatttcacactaaggtcttggattacagttcataagggtgttagagcattatgataaacaattgcatatgtaaaggttagaccaaaatatatctaaatacatacagatcgtattttaacaattaaaaggggcccatctgcttcttgtttacatttttacacaccctaaggatagatatataatatcaacaaaaatacctatatcgtgtgaaggcagattctgagcacagtgagccatataaagacggcaatatgcagatgctactggatctcctaatcctcttatcatcattaccaagcgtcggaggctgtctaaaggttggtcaagcaaaaaccgccagcaaggcaatattgccagctccaagtaactagtacaatttcagataaacagtcagcaaataccagtcagtgagaaacaatctttagtgcaacagcttgtcaaaattcaaaatgttattgacaaaatctttcaaacttttctgaaaatatgtctatattgtagcaactttttcaagcaattttgacagaaaaaaaaaatgcttatcagttgtcacatcacattaaaatggcatcagaaagtctcgaaccaacacaagcagagagaagaaaaataacttcaggggaaaaaacatgtacggaataaattaaatacagggcataggataaggacttcacatgcgtggaagaagctcttgcacagcaccaattttgttgaaccagttatagcaagtttcttttgcatcagcacaaatatcccttgcttgaaagttttctacaagattcaaataaaacatttaagaaaaaagatgtgacttctaaaggaggtccatttatctcatgcagatcatcaagcttgtatgacatgtacaaattagttccaataaacaagatacaagatacaaaatgaaacatatttggtggcttctgatgtttgagatactgagaacctttttgcagttaaaacacagaatccttagtcttcaaaacattagcatgaaaaagatttaatgttgaaaaactattagcgccctcagacaagccacaagcttaacctgaataagtaatatttatataactacagattatggaagtaaacaacattttgtgatgagtttcaaattgacaaaggacctgctaagttgcagcgtaaagctccatcttcggaaaactcagctttccgctttatgcgttgccaaaccaggttcccaagcatatccatgatatctgtgacaagaacaaaaagtgtaggataaaactcgaatactgacgtatccatcagaagcttagcaacctgcaaacagaataatcagtttcagccctcataatcaatcaaaatcaagacaaacttagacaagaaatgaaaataaatcagtatgatttcactcccactccgaaactaagtataaaaatgagttatattttaaatgggtaggcccatctctctaagtccctagtattttaaaatcttgttaaacaaaattatacaacatttgtattctgtcatataaatattacgaagagtaaagaaagtacaggaggaaaagaaaatacaaaatggcatatccattttaaagggccgtcaatccctacactatctgataaaggggaaaatatattatcccagaaaaagggattatcccaggtctctcccacttttctgatgaagagcttcttcaatcagcccactcaatattccttcaacaatttactcgacaccctctcaaccccccaccttcacaattgtttccatctctctctccagctaaatggaataactaaaacaaaaatgtctcttttttcatttaaaaagccaaaaggtgattgcactcatacaaactataatgttgaaaagaaatcattaaatacataaaaattcacctttattgataactttaaggatgtcactcgatcttcagcaagccaggaacgagtaatttcatctttgagttcatgtagtcgagaaacatactcctgccaagtaatcgtcttgacaccctcatcagcaaatttttgtggatcgtccaattcctccaagtgcatatttgttgaagatttctcaagtactgaaaattgggaggtcacataactaagtaaagataaataaaggataaaacaaaaggaaaaacaatgtaaaagatattggcatacattttccacttctcattaaaacatcgggcatctgtaatttaaagaataaataattagataaatataataaaaactgaaagggttagagataaaggatcaaaactggtttaagaatataagggattatttacctatcttactttaagacctatcctctaccaatcaacattgcacaatagaaattacagatgtatattagtatatagtaattaactgctatatcttacacttcataagaatatttcaaagtttgtgaacttttttcaacagaaggttagctcatatgagcagtattatctggcgactagcatagggcccttaaaatgcaaaatcataaacaacaatgcccatacccaagcttgattcattatctttatagctgagaggtggaaaaaagaataatgaaggaacctaaggtgaaatatgagatgtattaataaatggttgaatatttagaaatatcttagtcaatatttatttttaagcacaacacgtattcacaactttcccaagtctgctcctgccagataatacacctcttccttaaaaatgtttaacgattgatatccgttaatgcagccgattaaaatatgttttaatcacatggaagccaataaaacagtatcagacagttctactgttttccaaacagaaaaatgtccagcctttccctagccagctaaaacaaagacacagaaagaatgaataacccttgcagaaggaggtaatgtccaaattcacactggttgaacttaacttgccagcagtatctaaattcacatctatgatctaacctgatctaccactactgacaattaagaatgttcaaagccaatctacagtgtcatcacaatgcatgcttccatcatatgcagcatactgtatttgcccttagccatcttagataccacaatatttttatttatttttatatgcagtatatctttaacatttacataaaccagaaaaagaaaatactgtaaaacttactgaagcaacagaaaccattttggagacaggaaacctctgcgttagtaatctcctgaaagaggtccactcctttgttggctgatgatcagcagcttcattcaagttgtcatgatcaggaggggcagcatttgcattattattagttcctcttagtggatcatagaaatcagtgttcccacgatctacgacatcgacctaaaacaaacatatcaacaaataaatgaatactgtcaaaagcgcaagatatgtaaaattttaccgttacaaatccacctaataaacacgaccacagttttttatatatattttcattaagcaagtcaacaaatattttcattacgcaagtcaacagaaattagtaagtcctaaattgtagttacttacgaaatccttcctggttcccgacctcccctcctttcctcagctcttagtgcactattgcagtgttacataaactactggcatgcaattcatgactatgattgtttgaataattatccagattacatcagattttacagaactaattacactcacattactcgtttcaacaatatcgaatcattagactatatcaaacaggataaaggtatctacacagggaaagatcgatagaatttaatttaactgaatgattaaaatcctaggcgttttcttatttcaggatgatagaactgaatcctaactctacgcaataaaataaaaaaaaaactgatatatttcgtggtgcatccgaaaccgtgaatgcaacaccgattctgcatagtcacaagcactgatcaagcaaggtagcgtaattgttttaaaagaagaaaaaacaattgcgagagaaattatgatacgagaaagacctgggagagaggtggaggtggaggtggagcagagagaggatgagctccggcgcgtaggcgagggagcgcgtgagattcaagctcggcactgtaatttcgatgtctgaactccatgaaagcattcagcaacgagagagggagagagagagggagggattcggggttttgtcttttgtttttttacagtgacttggacaaggaaaatgcaggatcagtgtgagaagaagctgactatcaaattaattattattatttttacaatttcatatttatatattaagatatataaatatcagtcaaaagaacttaaataatacaatttaaataacaaattacgaatttagggctatttcaaaattatttaccaacctgggcagttggtcacgcccaaaattgggcgaccgatttagtgacggaaaattcgattttttaaatttttttgtttgcgaccaaaataatttgtcggaaaaactgttagcgactgaaataaagatcaaaattggcgtgttttaatttttgacataaaatatcatttaatatcatttatttttatttttatttaatttgaaagtatttttagactcatcttcatcatagatatgatcttttttacttgtttttaatattgttttatttagtatatttttttaattttatatgactttatttaatatattctgaatttttggtatttataatttttagtatattattttatttaatataatttctaaattttatatgattttgtttaatattttttggattttgtatatataactaatatttaataaaatattttatttaataaaatttttcaaaatttttggattttggatttttcaatattttatttaatataatatttttggtatatataattttgtttattttggaattttaaaaaattgaaaatttttatttttgatacttctcattttttctaaatttttgtaaataattttttaatatagaaagcattttaaatagaatattatattttggtacttctcattttttatatcgagactaccccattaagcacattattctcatccctctcatcatctctttcattctctcataatttgataattctctttcaaaaaaagtagaagacaattctccttttctctttttgttccggtcaaaagcacaaagtcgactaacttgtcatcgaaattacaccgaaacttaggctttctgtcaatcggtgactcaattgtataaaattagtgtggtcaaaacatttacatccaagcgagaaagggaattagaaaggatcgtccatctttcatggtgaatgatcaattgtgcgagtaggttggtcaccatctttatctctctgggtaagcgcaatgcaattctttgcatttcaatttgattcacttttgtgtcacgtagttccactcctatttctagagttctgcaatgtttcgccgctccaagtgcgctttggaattaatggggtgctacaatttcgattattgtgtggtgagtgcactttgggatgagtggaacaagtggtaaagtgtggaatgagtgcggaaaagttaggaatgaatgtgctttgggataaatgaggttattatataaaaaatccaaaaaatattaaacaaaaccatataaaaatttagaatatcgaaaaaagttacaacggcgtacgatatgtccttcaaatggtctaacttttgatagaaatatccgatcgaggtgtacgatatgtcgaaatgctcgaaattaatagaagtaataaaaaaaaagcatgcaattaacttactgaataattaaaaaagcagaaaacaagaaaattttagatcttcgaagattaaatcacaattttgaggtacttagaggcctcttttgggaaaattttttgaccaagtcccctttgaaacttgccaggtgcttctcctctcaatttcgaacgcgtggctaccagtttcgcctcaatcggacatttcagtcaaaatttatgaccgtccgaagtttatatacgcatcgctgcatctgtgcatgacacgtgtcaggagtaggtcacgcccagaactgggcatgactggtcacgcccagcaccaggcgtgactatgcccagttctgggcgtcaccaactgccccagattggtaaatagttttgaaacagtcccaaattcgtaatttgttatttaaattgtattatttaggttcttttgccgaaaatattattagttgccgtttctgctggttgctgaaaaaattaattaaaatactttaaatgaaaatactttgtagattatgacaaaagtgacatctgttttccagattggcgacctaaatttaggtctctaaattacattccgatgattttaacaattttggtaattaataaatatttaaactgcttaataataataaaatacttatttattactatcaaaccaataagatatataatatttccataaaaatgtataataaagtgcaaattccatacttgtaaatagtataaaacacaatgtatgacaaaattgcatattcatattataataagaaaaaaaatcaagtgcacttatgaaattgataaaatgtataccaaaacataataaatgatagagtgcagattcataatattgaggtggtgtaatataagtttcatttgctcattttattgttgaatccatcactacatcttctcagttttctggtcataatttttgcataagttataccattggttcctcaagtgtcctctcctaatctcccttttgccatatatattagtctttttaccttttgtcacggtcatggtaaatttcatttacatattacccatctttctataaatatttatatagtaaaattgatgaaaaatggttcattaagaattgatggataatgtgttcactgggactaataatgggttacttctgtgtattgcaacacaaactttcgatggaagtatgaaacaaatgtgactgcgtcataaagtaatgaatataagaacgacaaactaagtaccaacaactttgttgtaattgctttggagaacttacgtaaaatagcaaaaagtgaagggaatttcctacaggtcacgtaagcataattttccaacttgtgtaaatttagtttatccttttttaaagcagaatacacgagttgtcgagctctcttccgaatggtggctaacacttttaggatctaaaggtagactcacttgtgacttattaaacgtgattcacgttaggtgaaaccctgtgttaccttactcgagtaatcccttgaagttagttgttacactctctttaccctttagtatataggcagagtctatgatttatatactttttatacataaggagaggaaatggtgtcttagttaagtatataatccaaaaaaacactaataaaaaacttacaattacttattaaagaatacgagtgagaagtcgaagatatatgacagcagtaagaaattccataattacattagtataatgccatgttggtagttttattctaaatttacagaagaaaaaaacagtagcgggcgtatgtttgtgtcagctgcgattgttctgagatcaaatgtatactatatatatatacacacacatggggattttgacatgttaccacttttaatagctattttattttttagatgcctgaataaaaagaaaatccgaaaaatttcaaagttcaaacaaagcatttctctaatccgggtcctgtagcacagctcttttcacattcccctaatattacctgtttatgcaaagtaattaattgtttttgttagaaactagaggtaatcatacttgagccggataatgaacaacaaagtctctatctaagcatttaactaactggacatacaggtctcaaattcaaaactacttaagctaaaataatttcgcaacaattgattcgcacagttagtaattaattagcacctttgttaaatttagcacactatttctcaaaaagaaagcgtgtgatcaacaaaaacgcacttgcggtctgaacgtgagtttgaagtttctaaattcttatcctctttgggaagtatgccagtactaatcaatccctttgagagactaataaagagcaaaagtgactctgcagcaacccagcaagtaaaaaacatgacgcaactagctgtactgtattaaacaccatccagaagaaagaaaaccccttcataagatctctctatgcatcacattttcccaacacaaagaaacacatgaagagacaacaaaaaaacatgccatcttcactcaccttaccattaaccattttgacagtactgtcttttctctccttcgcccttggccacgatgctcaaccctgcagtgaagcgttcctcaaactagcccaacaaaagaacatctcagcctgtaagacactgcgcactctgggggcagagtttgcttggtcctaccacagtctcaccaatgaatccatagaactagaaattatgttccgtgccacactccccaactcacaagggtggatggcgtggggtgtgaacccgggaaaaaggcctgagatgattggaaccaaagccatcatagccattaaacatggcgacggaacgtggaaagtagacacatacaacgtcaccaaagagaccagacacggttgcagccttcttccgtcgaaaatcgcgtttgtgaacaacaaatcagttgaaaaggtcgctaatatgaacaccatgtatgctacattggtccttccttctgatgtgtacaacgttacgaagctgaaccatgtgtggcaagttgggattgacattgacgatggacatcccctgaaacatccaacaactcttcggaatgtcgacagcacagaggtcatagacttgactgacaaaaacggtcgcagcactggacagtaccggagttatcttagatcggtacgcgagagctattttttttttattattctttgattaataatgcttaggtaaagatggtcatggtctttgactttcgacaaaggtatacctggttcaaaaaaaaatgatcatgaacatatgtcatcatttcaatagtaaatttaccaatcttacttgtctttgatccaaatcatattttattttattggtaaattaactttttggaagtgtttgtgtatggtaagtgttcattacacaaagagtggcaaaatggcatgactcaaactcggttaggccgaattcactcaataaaatgtagggagacctttaaattttgaatctgaattaaaatttatatcctttagtgtaattcgatcatgatctaatgtaggctaaaaaaaagtctggtgtttatcaaatttgaacctggttttagaagtttgaattgaatttggatcaacatgttaccattaactattcaaagattcactagtatttcaatgaaaattaggcatgtgaaactggtaaaattaaaaaaactttaaagatagctagatattttcaagaatattgaatttgttctgtttatagaagaatggcaaattcaacttcccacatgtctaactactaattaattaggtattagattgatatacatttttctttttctaattaatagaatcactctggtaaatatacctatacaatcgaggtgatcattgttacacaaataagaaataaacaacaggattagtctcatacgagaatgattaatttctttcctgtgtgttgaagaggcacatttaatttatacttatggttgtgcatgaaattaatctaggtacatggagtcctgaacattatcgggtggggaacactgttgccgattggaattataactgcaaggtactttcgggtgtttcctttcaaatgggagccaatgtggtttaacctgcacattggttgccaattaactggttttctcgttggcaccactggatgggctattgggttaagtctcggccattcttcaagatactacaccttccacactcatcgaaactatggcattctcattttcacccttagcacagtccaggtaattaattaattaatatttctttctttctatatatatatatatatatatatatatatatatatatatatcatgtacctttacaatatcaaatatcatcataaaaaattagctatttaattatctaataaagcgaatatagattatacagatatataaaggagattgtagatggatagtccgtttagggtacgtgtgggattaatatataaataggtctaaagggaattaaaatatttttttaaaattaattaatataagaagcatacttttaaatgatgatgaaaggtctatgttttaaaagagaaaatcataatagattaaaaaatacttttaaagaaaaaaaacactaaaaggaacctatttagatttaataattaattttttaaattatatatccctcaaaagcatgtgctttcacccttggttaagttgtagatccattccttagtaattaggtttagctctaaaatatttaattaatatatgctccacatatgttttaaaagtttaaaatatgtagttaatttttttgctttctaaaatgcatttagtataagaatttttattattattgaatattcgatagttctaccattatattaccaaaataatataagggctgaattatctgttaaaaaaattagtcacccactattaattttctaaccaacaattataatttatagtatttacgatttacatcgctaaatcctattcatatatagatttaacgggggaaaaaataaagaaactgatttaatttcattcttattaattgcattaattaatctctattaggatatacattgatgaaagatatgtgtttggttttcagatgttggcttttcgcttgaagccgaaggtgacggatgattaccggaaatattggaatatgtaccatcattttcttggttatggattgctggctatcatattcataaacatattcaaaggaattaccattttggaaggtggagatgcatggaagtggggatacattggaaatcttgctttgttgggtaccatcgcatttggtttggaggttttcacgtggattagcttcttcatgttgaagcacaagcagggaaacaaagccaagaacaaaccagagccagaagcaaaagcctaatatatatatatatgtgtgtatatatatatatatatgtgtgtgtatgtgagtatctatgcatgagcattacagcacgcgtcgaatatattgcctcaataatgtgtttttttattttttttggatacaataataatatgattgcattttttgattgaaaaaataagtagacattgacttgtgcttgtgggatagtaatttattttcctttttaggttgtttcattattattatatcgaacaaagaagacgagttaagaatatataaatatatatatatatatatatatatatatagatcgacctcttaatatatgtcattattaatatctttttatttatattaaaatcacttcttaatttatttatgttttttatctgttatttttattaatttcttctctattttataagaaatgatatatttattatgacatatttaattagtcttccaaataatttttaaataataaatttatttaatatttcaaaacagaaaaaaagtatttaataagaaaaaaaactagaaaatcagtatgaagatgttacattaaattataattaattaaaaaaatgtgttttgctatctccttgtttaagaaattatatcatttcttcgtaatgagtttgtgtgcgtgtacatattaaagttcgaacctagttacggctatcaccttatgtgtattatccaaatctttcaccactagtctttgtaacaagtgtatcacatatgatcttttgaaaaaaaaattatctctttcttttgataaacttacaataaggatgaacaaattcatatgtttagaatagatgtaaaatgaataagatgtatttagaaattagttattttaaaagaattcttcctaaatatataatacacatcacattctattttattttaaaattgaattaattttataagtttaaaaaaatttaaagttagaaatttctcaatagataatattgtttcatgatcaatatctaaccaaaggtcaactacattaccaatagaaaagatagtggtagttagtggaggacaaaataagttttggaatttattatcattctcccaaaaggatatcgataataatctcttaggtactgaaagtattaaaaaaaataccttttgagcactctacaaagtatttgaaattcgagaaaaaaatatcattcatataatatttatttttaaaggagttgcaaatggattcgttgatttctcaatcatggattggaactgctaagtccacattacagacaatattatatataattattactagaaaacaaatataaaagaatgttggaccatggaagttctccataataattgtgactcgttcccttaatcaatttagcttttaatataggatcattcaaaatatatattttattcataaaaattgaagataatataaaaaaaatttatgataaatcacggactctgtttaatcaaatgaactaaaccccttcacataaatcaaaatatttgaaggatctgttttatcatttgtcctaacaaatttaaattatcagctaatatctaaatgatcattgttgaaagataaatgaaggtaatttattaaaaattaaaatcttcatgtgactattaattaatttttaatcttaattatttaaggttatatggctcaaatttatatattttattcttaaatgtttacactaaatatttccccttcaacctttttcatttcataacatatttttttatatcattttttttcttattcatttttttaatttccttatctatccgtatcaatatttattttttcaattaacattaaatctttttatttcaaaattaaaaattttaaacatatatttaataatttattttatatttattactaataaaacaaccattctttactttttaatttatattttcacattttatgtatacttataaaaattaatattttattaattaaattcatgtttaaaatttatcaaaattacaaatttcaaacacatgtatttttattttttattatatttattattgataattatttcattaataaaacaattattcatttcctttttaagttatattttttccatatttgatgtatatttattaacatatttttttaataccatgtttttcatacatagatctatctaatttgttggtgactaattttatcgaaaaactatattgactacatttattgtgtctttatttcttatcaccttttattgtgtcatgcattaagaacctgtcttccagccgtgttaagagatgctacattcagtagttgccttcgtgtaagtgatattattagtataaaaatttggtttaatcaataagattgaagtgagttgattacgtgaattgaagattaacaatagggcattattcatggttttaggatgtttacatttttttatgttctgtacttcctcaagcatatacacgtccatctccgcaacactcactctcaccctgtctcacttcaactcactttttccaagtccggtccttccggatttttttttataaccaagtcaaattccttttagaattgcgtgtttgggtagataggtcagtagatcggtcacgacatcttgctcttattgaataggtgggacatatcattttgttctcattgaataggtgggacatgacatcttactcaagacattctaataatatgtactttaaagatgatattatcaaactaaccctgcatcaaaattaatcattccaaactcatagttagattaccttacctgtgataggtgttcaagtatagtataaggttatattatgtactcaactgaaaaatgagaagtgaggcaatgaaactcccaacaaacaacatcatccaaccaaaaactagtggcaggaactaacgaccacatagtcattgtcccatcttccacgtggatctattatcatgaacgatgcattccaattccttatcaccccaaaagtccataatttatggaaatcaaggtataattttcatcagcactaaaattgagcttcatgttagtggcaaacttatcggtggaaggcaccacatgagggagtttacgcaagccaatcttggcagcttcaagctttgcaagatccttttgagaagaagaggaggcaacaaacaccttagcaacacttgcatgtccttcccttgattgttttatatcaacatgcttccccttcttttggcacatctcatacaacatagtcactggttgaggctgtttctccaaagcatccggtgtcactattggctccaaaacacccctcattatctgccacaatcacaattattttcacaaaccattttttcatcatcttgaattatacagcaacttcaatgtaaaagtaaaagcttattctaaaaatcatttataatagttgtcattcattttcatcataatgaattgattcagcactgcaaatgaaattaaaaaccttgcctgataatcacttataatacttataattcgttatcatcgtaatgaattgattaccacaaaatatgtttcgatttatactaatttaagcatacgattttaaccaatttttgaatgtaatcctaaaaatactttatcatattatgcaatacaattttaaatatattttatattatgcaatacaatcttaaaaatattttatcctatttttgatacaatattaaaaaatattatatactatatttgaatacaatcttaaaaaatattttatgtaatcttaaagatttttattatattatcttatgtaatacaatctcaaaaatattttatcttttttaatataatattaaaaatattatattttattatatcatatgatataaccttttttattattaaattacttttttaatttttaatattataataaaatttatattaataaaattttaggggggcggtgcccaccctagcatgggcggacgcaggctatagattgggggacagtgccccccccttaaattctcaagaatatgtttaaaaatttttgggtaatttttttataataataaaataaagtaaaataaaaaaataacttagatgttttcacaaggagaaattgaaaagtatagaaaaaaaataataaaaaagatgaaaaataagagatgagtgagtgtgaatcggtatatttataattttcatgaatgcagtgaccacactcttgttatttttaagcaccagccacacactaattttttttctggatccgcccctgcaccctagcccccgccccccttatctccgcccctgtccgcaacactcactctcaccctgtctcacttcaactcatcgacaaacttttttccaagtccggtccttccagatttctttttataaccaagtcaaattccttttagaagtgcgtgtttgggtaggtatgtaagtaggtgggacacgacatcttgctctcattgagtagtgggacacgacatcttgctctcattgaatataactacacaagacatctttttgtagcaaaggtattaaaataaaaaataatagaacaatctaaagaaaaaaaataataaaataatcaaggataacaagattaaaaattatcaataatatttttagaaagaatatttgtttgtcttaatcatttgatttattagaagaaaggaactctaattatttgaagatcgatgaaaagataaatagagtttgatcaagattttttttttcaaatatcaaactcagataatccaatcgaatcaaccttattaagtttgccattactgaaacatgattccagtattgtgatgatgggagcggggtgtgtggggattttggcggtggttctgagcgaggaaaaggccttggctttgggcccagaaggcccacttgtggaagagttctgggacaccaaacattggaagagtaaaaattactatcaaaagacaaaacatttttttataatcaattgatattttataaaattactttataaaactagcttgaacacaaaaaaaaataaattaaatgtatattaatatatatatatattttatttttttgactttgaatatattaatttataaattattgaataaagtatatttgacaaacaatattaatataacatttaatattatcagtataatattaatataaatatatgaataaatagatttttcatatattttatgacataaatttgatatttaattaatattctataaaaatatattttcaaaaaaagtcaaatgaataataataaaatattcagaaataggtatatatattatatataaataaatattaacggtcatatagcaaaataaatttatgaaatttcaaaaagtattaatataaattactttattataaaaaaattaaaaacattaaaatatatatatatatatatatatatatataatatacccgtacatacatgataacagtgcgtgtttgattaggtaggtcaccacatcttacttgtcacaagtaaaacaatttttgattgtttcttcatttttaattatttatcataattttttagactaaaatcaattttatttggaatccaaacatgcccaaaatggctcttgattataaaggcggataatctttatctatttaatgtagaaacaatgtacatttaagtaactttacaatgtagtttttattcttaaaacacgagtgacattatgacttttattatgtggttcactgttttaattacatgtgaagtcccagcttttattttgtggtcgatctattgctttatttacatgtgctttatcatttgacatgtgttccacctctgcaaggacctgccaagtcggagttaggacttaatcatcttaatcattggaaacttatctcaacataatttgaacgccttgcaataaattttataaaaatgatggcaaaattttcgtcttgaaaaaaaaaattgtttagttataaaaaaacatgaataaaattccttttaaaagaaatatctttggcttagtagggcaataacatataataaaaaataaatgaatatatgccgctggaaatctaaatacgcaattatttatataaaaataaatatgcttaattaatcaaacaaaccaataatagttcaatggctacataaaataagggatgtgcctttatgactctaagatacctgatagacaattataatctagttccaaaataagatatcttaacgagggcaaatcaagtagtggtaaactaagatattaatgtaaatttaaggtttcaaatatttagaacctaaataaagaagttgaagttgttcaaaatattacatggctactgaggccatgagagaacaagtatatatacatgaatcacacttaaaacaactaaacctcattcgacagggcatcttatccttctctatgttgcctggttcaatgcccaaaagttcaggtggattttttttcctttttttaaaattaatataaagaaactattctatgtatatatatgtcatacttttaagcaattgattgtgaaacatacataggaatgttcaagaattttcttgatcctccaattcactttagtaaccacattcatcctcagttaagtctatatgtttatcatgaattaatttggtcatgttccccctcctctaaactttggtcattaattaatttagctttagatatgcatgtgatatttttctaatggtatttgttttctcatatgtaggtcttaaactgttctaattaattattttattttcacttgtatatgtttgactcaaataagatgttcggtaaactcaaggattataaaaattagaggagacattcaacggcctcccaccatagacaaatccatgtttaaatagtaacacaaaaaaaaaaaaagattaaaacgaaatttaagttcatggtatctagataaagtttaggaatcaactaggataaaattaaaatttaatatgtctatttgtagaagctgagataaaatttaaggtgcccaaaaatactctttttcctaaaaatataataattaaaagagtacattagtattttttttaatgttagtatatttttaatgtaagggttagaattttaaaattctgactgcacagttaaatccaaaatattgaaaaaattaggaataattttttaatttattttatggaaataggacaaacaactatattaataatgattttttattctcacttgttaatattattattttaattaatttaaatattagaatttatatgttgtaaacaaagattaaaatttctagcctaggattaagaattttttaataaactttcaatatagtagtatgttataagtggatgactggatggttaatatatatgtagttcggatggtctccaactctcccgcatttcctgcataattttttttcatcaaaatctcaaccgaacatcaagtcatctctcatctctggttagtgtagattcttccattcaatgggttcatatgttgttaaatcgaaaaacagaagttttgttcattgtgcatgcagcaggctacaaatgatcagcatgctaaaaatatacacaagatcatccaatggattttgcttgcacacacaagacttgtctcttttgcttgcacacaagacgaatcttttgcagttacttaatttagactcatatgcttgcacacactttgagtaagaatggatatgagttcttcaattgtgctcgatctccattgttatatatattttaaataatgcatgatgaactcaattatcaattctattcttgtactccacacttcagaaaagaaaaagacaaatctttgatgtgagaattgtctttcttcatttatttcgatttagttttttgttgatatatctagttctgttattttattcagtttagcttgcagttttatatatgggctcctagcaccctttttctcaccaaaaagccatgatcgtacgtgattatcttatacattttattttctattatttcttcaaatactgccaacttgatgtgattgtggaccttagggatgcgaatggaaggtcgaaatctatatcttagttgtaagtttttaccttcatttattgtttagactttagaagataaggttaatctttactttggaatttagttttgtcatatatctgtcaatgtttttgagatgggaccatgaatgaatgaaactaatatgaaattttggttgtctttgaatatgcaagggagttgaagaatattggtgaaaataaaccatcaaatgccacacatatcaaacgaaagtgatatttcaagcttgaaggaacgaaagaacattttgcattttaattgatgataactactccatcatcatgtataattaatctttaaaaaacgtactgtatacaatttcactattaaaattgttttactctattaccaaaaagaatggtaaacaaacctaaacatttaaatcattgtcttaagaaatacacagttgaaaatatggattttcaaaattgagattggatttgggtgcatttgatgcatattaaaagaagaagaatagcacactataaggaaattaaatcacattacaacattttgttataatgttgtttggttccacacttccacttacaacacaaacaattttatatggattcgacaatgttccttgttttcaagaatttgtcaaaattgattggtattttttattagacttaaatatttttttttatctttgatatatattagtagttttatgttcccgtcattttcttgttttagtctttttcctcctcttttctcccttcttttattttagctttttttctctccctttttccttatttttgatttatcattggattcatctaccattgaccccaattaagttagattaaaggtgttgttgatgttgatgtatatgttccctgatatttgaacatttttattttagatctatgtcgttagttaagtaataacgtgcactttaaatatttgataagacgatttgtgatgaatcaaaaatcgtcagtatttgtttcaaaatcaaattaaaatttttttacagttaagaatcgtcataataattaaagtaaaaaataaataaatcaaacaacaataatttggtcctcaccattagcgtcgatgtcgacttccaccagtgcaacaataattacaacatggtgggaaccacacaaatctagatttggagcaacttttgtttgtcacagcggaggaaaatgacagggttgaaggggatcggtcatcgccgcgaccttgttgaagatctaccatgttgcaccacacgaatccagatctgccacaactttcatctgccgttgcgaaggatgatgaaggggttgaaggatgagtggtcattattgcttcgttgtcgaagttctgccatatcgtgccatgaatactaatgtggttcttaccccttcattggaatcaagccagcacgcaacacactattctatgaatctcaattttgtgcaaacaaggaacccttcttgaacacccaattgaagtcattgctagaattcttgactatcgaaattgaaagggcaagctgccattcgttcttcaaaccaattccatttgtaagagcatgaatcatttttattccaacacaatactcaaatcgtgcctccctcgatggttgtctcgatgggggaaggtgtgtacgggaatttgacacgggagatttggtacatgcgactgcggtggcagatgcccacgatggtgacaaagtgagggcccactacggatcgacatcaatggagacatagatgacacgagagtggttgaaggtggcagaggagaaggtggtcacgaaagaggagggagaaggaatgaaccttctcttttaaaaaaaattgagatctattttaaatttgatttttaaacaagtacgatgatttttgattcactacttatcaaatatttaataaacacattatcacttaatttacggtagggatctaaaacaaaacttttcaaatataaaggaaaaggaaaaaattatcaaggataaaaacatagttaaacatttttactatatgagagaaaaagttagccaataagttatcagttaaccaatatttgaattatcgtctaatacctcatctttagttttgtaatgcacaacctatgctcttttttgttttgttcttttaaggagaatacacactatatctcattcatccaggttatttaattttataattaaaaataattttaaatgtatttaaacaaatcaaaaccgttcaaattcaaattgttggaccattcaggttctctataataattatgactcattcccttagccaatttaactcttaatataggatcattcaaaatatactttttatttgtgaaaattgaaaacaatataaaaaatttactataactcacatactctatttaatcaaatgaactaaaccccttcacataaatcaaaacatttgaaggatctgttttatcatttgtcctaaccaatgtaaattatcagctaatatctaaatgatcaatgttaaaagataaatgaagataatttattaaaaattaaaatcatcatgtgactattaattaatttttaatcttaattatttgaggttatatgactcaaatttatatattttatttttaaatgtttacactaaatatgtccccttcaacctttttcatttcataacatatttttttattcattttttttaatttccttatctatccatatcaatatttattttttcaattaacattaaatgtttttatttcaaaattacaaattttaaacatatatttaataatttattttatatttattactaataaaacaaccattctttactttttaatttatattttcacattttatgtatacttatataaaatttaatattttattaattaaattcatgtttaaaatttttcaaaattaaaaatttcaaacatatgtattttttattatatttattattgataattatttcattaataaaacaattattcatttcctttttaagttatctttttccttatttgatgtatatttattaacatatttttttaataccatgttatttgtacatagaattaccgacttggtcagtgactaattttattgaaaacttgattgattagtgtatctttctttgttatcacttttattttttacattacaatatttgaattcaagacatgtttaagaggatgaaggcattgccccagtatcactaggaccaacaattgattgatatttattaacatatatattatgtcgtttcatgagtattgattaaaaatattaaataaaccttgtcaagtattttaaattattttaaaataaacattaaataattcttattggaaagattgacagtcaaagatgttaaaataaaataaatactccctcttaccagtaaactatttcataaggattaaaaatttgattttaatctatataataatgaaagcatctgcaatgaaaattgctttaaaaaaaatattattttaatgtgtttaatgtgatattgaatgacttaaaattagagagttatttatacaagtaattattactcatgagttaactttataatagatataagagatataagtaaaatatttgttaattaaacaacttattaatataaatactattagagagaaaattaattgaattacttaagattgaagtaacataaattaagttacttagagaaattcataaagaataaaaaaatagactttttttattatcattgaagttgtattgaaaattaagagaagatatattgttaaatttctcaataaaaactttagaattttaatttcataagagaaggctaataaacattttccatataattaatagtgataaagttgaaagaattaggaggggcacgcacggtgatagaaacggggcgttttagtttgcatgcaaagcatatcatatcatgtgtcgcaggctccttccactacgcaccatttcgtcgcatgatagataatagtaatgaggaagtttgcattacaagaacaagaactaaaccccactcactcactcacacacacacacacacacacacacacacacacacacacacatatatatatatatatatatatataatactcattcaatgcacataataatacaatttcttagaatggcgaatttacccgaatccacctccacaagcggcgcgtcgtctggagctccttctgccaccggcaatgatcgcagcaggatggcgtatatggaaatcctcgttgtcgaactcagcaatccttttctccgagcaaactctctccatgagctctccaatgtagtacttaccttccgtcgtttttccactctcgtgcgtcgttttaatagtccaattaagtactgtataacaccccatttacaacgccccattattccatatactatatcacatgcgtcgtcgtttcaaggctcacacggttaatattttatatattttagatgagagacttatttgaggatcttgctccattattgtggaattcttttggtaccattgcagcaattttacaggtattattacttattccttttgtcactctttatctttcttgtctttttatatttttttatgaatgaatagccccataaatactgactaatattttgtttcttgaataccttgtttgtttcaaatcccagttttatgtatagtcttgaaaatttggttgtactttgacgcattttggtttgttttagaaacaatttcaaaccttaatagattttagatgatatattcattgttgagtagtgtaatttttttattataaaaagagagaattaaacatgctcctaatttatttatttttagttttttttttctcaatgaagaggtgcttctttgacctttgttgcccaccgctcactaggatttttttttcttccaggaaatagtttcagcatacccttttatttcacctccaggcctgactcaagcacactcaaatcgagtgtgcaaagctcttgttcttcttcaggtccactcacatatactttgtctggtctttctctccttttcttcaatgcgttcttactaacacatatcttttgctctcatggatatcttacagtgtgtggcatctcaccccgatataaggatggaattcctccatggtaatgatattttttcttattcacctgaaggaccgtgaacttctgtttggtaaataatattatttatgataaatagtatctttgaaaatttggtcttcaactgagtcaaacggcattgcatgattcatgtatttttgtggttgatgttgttcccaaactttgcttttgtacggtatatgttcaatacatataaaatgattgttgatatcttatcatctcctagatatattttccctttttttctcactaataaattttcttttgcatttatttaaaattgttataagatattgtaaaagcaaccaattgcaaacaatttaaaagtaagaaataatttgttaaactataaaatttcataaaagatgattaaaattgttataagttttcttttgcatttatttctctcctatttcttttaccattcttttcttttatcttattttctttttttttttattttattttctctttttcttctccttctcctttttttttttttttaactttcttgtatttatcattaagttcatttattatcaacctccaattaatttggattaaatgtaatggtcaaaagaccatacatacataatctaaaatgttttctgcctataaaacagaatcatgcagtcaatttttatatgcaacttgctctctctctatcttatcataagacttctactttatcttacttgaaaatgaagtttctctctctttcaatttataggtcataccacttgttcttctttcttagcattcagtcatacttatattttttttactgccaatatactttcataagcatccatggacagaaacttttgggcaattgaaaggcatattagttgttcttttgttaatataaaattaaggagattgctttgacattaccatatccgtttcagcagggtttttgctcattgaaactaacactttaaggaaaaagatatgactctttcactctttacacttacctttttctcatctgcagctcgtatacctctatatatgtatcccttgcttaatacaaccagtatggccaatccatttgagaatatgaggcttaccagtcttggagtcattggtgccttagtgaaggtactacgtccttgctgattctgttattgaatacactagactatgagaagaataattttttatacaacatttatgctgaacagagaataatttcaattagtaaattattgtcacaataaaccttgccataaaaaactaaatactacaataacctcaactaatatgtcatttaaaaaacagtaataactgattattgattattataaatctgtggcacacaggtaaatgtgtaaatattttagttgccacaaataattagtcttgttataatcttataatgttcatgtagattttcaactatttgttaagtttcaaattcattcctgtaataattttctatgatgtaacaggtacatacaactcaagttgttcggattagttcatcgctagtatcagggaacaaaattttccgaactattttatgcccttcaagatattgttgattttttttcctagtgggatgaagctattggttttttttttttgttgcttgtcacatgtacatttatacttgaattttgtcatgtgtttaatttcctttctgttgatatttcaccagtttcataatacagcagctataagtttccttctttcaacagtttcttccgctttgcctgcatagtatgcaaataggcggtgaattgtcaaaaactgtaagtttactgatcttgttttaaaccaatttggttcgataaaatattttatttggatgaattaaacttgatttttatttgcttcatttttctgagttacattttttgggtatgtatgatgaacatgtatgcatgtgaagcatgttccaatacaatgctacataggaggtgtaaggcaattagcataccatttatctgatcaatgagattacaactgaggaaagtggtcttggcataagataaatggatactatgtgaacttggggagggatatcatttaagaactctcttttttttcatcttttgaaatgttggtcttaatataagtttttttagtggttatcacaggactgttgaaactcttcttgacatatttggttgtagaagagtgctagcaatactccttttaacattctattattggttgaaatttgttgaaaatcacaaactttggtaagttccacttttaaattaggacagagactcatcaaacgagaagtaagaaccactattataattttcaataaatttaaactaataaaaaataaaaagaattttaagagtgttgcaaacactcctcttggttgtatcaaaatgcaactcaacaccagtatttgtagttacatgggttgaaataccccgtccttgatacttgagatctaaatctttaaataacacgtctgtttaactcttgcgttgtacttcttgtggtgcattgtaaatgctaagccatgtgtttgtttttgccactatctcgtgatcctctttttatgcctatcaaaataattgtaatgggaaaatttgtgtgtaatccaatggaagttccaccaactgcatgttggaacctttatagttgaacaaattctgtcggttgaaaatggtatgaaacatatttgtacttcagcagggcgcctttttcaagtatatatagttttcggaacgatggtggtaactcttgttcagcaaccttcgtgtagtcttttgaaggtcattattcgttgttatcttcgtctgtcagaaaatcagaggtttgttaagtagatagtaactccagttttataagggcaaaaaaatttaaataatgcgatttaattaaaaaattacgaaaatatggcgttttgaaatgtaattgcaaatctactgcgttcaaacacgtctggacaaaacgtgttaaaacacgtcgagctgagacgtgttaaaacacgtcctgggaggacgtaaatgaggctggaacacgtcctggctgggcgtgactttgccctagacacgtcctgcatggatatcgtcgtgtcggggtccaccaatgagtctacctgtgcgacgtatcttcagctctctctgtgtgtcctcattccacactgcctgtgaaatgtgagtgcgttgcctccgccttcgaagtacatcccatctatatggaccgggaagaacatgcgttgtgggatcgataggctcatgctcccggtcagagccagaacgaggtgactcagatgacgatgactcagccataataatatgctacacattttataattatattataatataaaccctaattttaaatacaaattatttaattcactaactatcaaattatttttacaaatttattatgtatctaggtcactatctgataatctacttcgtaatctaggtcactctctaataatctaactcaccaacgataaaaaggtctatttttgttctggtcacaagtgtttcaatatgctatataccttattgtcatcacaattagtcatctcatcaatattaactatgtatgtcaacaattttcattaaaaaaaaatataaaatacaagctcatttgtacaataactttaaattatgattttgcaaagaaaatgaaatatgactctacatgcttttttatttagagtttaacgttgatgattattaatgtaaaaaattacaatgttattataaacaattattttaaaaaaattaatataacttttaaaatagttattataaaaagccaataagattatcctagaggatggtttttgattggataataatataagatgatttacattgttagttcacaactttttttcttttattttatagaattaaatatttaaattttaaattaactattttaaataatatatggtatttaatgcatatttaatttcttattaggaagttatgaattaaaatttgaatacaattttattctttatataatcatagaattggtggagtgatataaatacttattatgttcacatataaaaaattcatttattttaacaaaacaattgtatttaattttttttctaaaattttattgaattaatactaattaattaattctataatttgttttcaaattgctacaattttgtaatcttttttaaattgtaattcattaatttttttccaaactaacaattaacctaggtcacccactaaataactattttaaaaatctacatcactaactaaaccctaacaactaacaagtaacctaggtcacccacttgtatcctaaaccatagaaaatatttacctaaaccatagacctaggtcctaatctaggtcactatctaatactctaagtcactaaataacaatttaagtaacaaactaataacaaacaattaacctagctcacaaactaactaactatttaacaatctaagtcactaattaaaccttaacaactaactatttaacaatctaagtcactacttaaaccctaacaactaactaacctagtaagcatttaagtcactaactaataatcaagtaactcaaaagaaataaaaatattttactactactaacttgatttatatagagcttcttgcttccttgcttgcaccctatttgcaccttccttgcactttccttgcttccttgcttcaaatgagagaaaaaaatttgagagaaagagagtttagagaggcagtggcaagtgtggctggggtgtgggtgtataaaaagggggagctgaaacacgtccctggggagcgcgaatggggactgatcacgtcgctgcagggcgtaaatggagctgatacacgtccctctaggacgtgaatggagctggaacacgtctccccacgacgtgatgcagtgcaagttgcatccctgcaggacgtgattgaacgctgaatacgtctgccattgacgtaactcaacacgtctcaggtgcccgtgaatgctttctgatcacgtccacccatgacgtgattcaacacgttcagctcaagcgcgaatggaagcagtagatgcgtaatttgatttcaaaatgcattattttcgtaatttcttattaaaatagcattatttaaatttttttgccattttataagtgcttctgcagttctgcccatgtcctttacgttcttcccaagtttctaataaaactttggtcatttcaaaacagagtttgtcatgcattaagaacctgtcttccagccgtgttaagagatgctacattcagtagttgccttcgtgtaagtgatattattagtataaaaatttgatttaatcaataagattgaagtgagttgattacgtgaattgaagattaacaatagggcattatttatggttttaggatgtttacatttttttatggttttggttttatttattcaggaacacccaacagctaggagatggctacagcagttgcttcataatattagagtcaatccgtttcctgcacaacaaggtggaggaggattcgatcatatgacggggtcgtgagaacaagactttctggggtttctacatatataaaataggattttcagttgggcatgtatagagagaatgaagaattgaatgggaagggaactatctttccgtttgatgttaagagtgaagtatacatgagctgatgagcatagtcacctcttaattgaatgcaaatattaaaatcataatgagccatatatttcaaaaataaaaaacttctcttcatctatatgggtaaaggagattgttagagattaaatataatatgagagtaaaataattattcatttttttcttttaaataatagaatgtaaatttagttccatgctattataatatatgcaaccaatagactggaaattttattccattatattccactttatctcattctatttctttttcatcaatccaaacaagtccaaaactcaccaagataagagtaaggaaccaattcgataattcagttgaccaatagaagaatctcctcaatcaaaacccattgatacctcgttgatcaaatcagacctaaacacacaatataaaacatccaagaacatacacaccgccaatcatgaactaaatgtgtcagggagagagaaaaaaagaaagaaaaaaaaaaggaactcatctcatggtggtggtcagcgacaaagatggcaaatttgcaactaatgcccaaagcattggatattgacgtggaagataagggggaagcgttaatcgaactggtttgaggaactcctcttttttctcaaaaggatcttgcaaagcttgaaactgccaagattggcttgcgtaaactttactgctgatgaaaattggtttgtgaaaataattgtgattgtgaggggtgttttggaggcaatagtgacaccggatgctttggagaaacagcctcaaccagtgactatgttgtatgagatgtgccaaaagaaggcttattctaaaaatcatttataatagttgtcattcattttcatcataatgaattgattcagcattgcaaatgaaattaaaaaccttgcctgataatcacttataatacttatcattcgttatcctatttttgatacaatattaaaaaatattatatactatatttgaatgcaatcttaaaaaatattttatcttattatgtaatgtaattttaaagatttctattatattatgtaatgcagtttcaaaaatattttatcctattttttaatgtaatattaaaaaatattatatcctattatattatgtaatatattcttttttattattaaattacttttttaatttttaatatatataataaaatttatattaataaaatttgggggtggcccatcctaacccccctatctcctcccctttccgcaaaagtcactctcaccctgtctcacttcattccaagtccggtccttcagattttcttttataaccaagtcaaattccttttagaagtgcgtgtttggacgacatcttgctctcattgagtaggtgggtcacgacatcttgctctcattgagtaggtgggtcacgacttttttttttttatacaataataatatgattgaattttttaattgaaaaaatgaagtagacattcacttgtacttgtgggatagtaatttattttccttttaggttgtttcattattatatcgaacaaagaagacgagttaagaatatatatatatatatatattatatatatatatatatatatatatataaagaccacttaatatatgtccttattaatatctttttatttatattaaaattacttcttaatttatttatgttttttatctgttatttttattaattttttcactcttttataagaaatgatacttttaattagtcttccaaatattttataaataataaatttatataatatttaaaaatagaaaaaatatttaataaaaaaaactagaaaatcagtatgaagatgttacatgaaattataattaatttaaaaaaatgtgttttgctatctccttgtttaagaaattatatcatttcttcgtaataagtttttgtgcgtgtatcatattaaagttcgaacctagttacgactatgaccttatgtgtattatccaaatctgtcaccactagtctttgtaacaagtgtatcacatgatcttttgaaagaaattatttctttcttttgataaacttacaataagaaaatatataatttaaaaatttagaacaaattcatatgtttagaatagatctaaaatgaaatagatgtatttggaaattagttgttttaaaagaattctccttaaatatacaatacacatcacattctatttttattttaaaattgaatcaattttgtaagtttaaaaaatacagggatttctcaatgggtaatgttatttcaatacttaaccaaagaacaactacattaccaatagaaaagatagtcgtcattactatagtggtgactgaaggacataatgaattttggaatttattaacattatctaaaaaggatatcgttaataatcttataggtatggaaactattaaaagaacaccttattaagcactctacaaagcatttgaagtatgagaaagaaatattattcagataatatttctaaggagttgcaaatggatcaatgagttccccaatcatggatggttctaaaacggctaagttaatgacaatactatctatagttattaaatataaaatattgttggaccatgcatgttctccataatgattatgactcatttccttagtcaatttagctcttaatataagatcattcaaaatatactttttattcgtgaaaattgataagtataaaaaaaatttacgataactcaaagactctatttaatcaaatgaactaaacccctacacataaatcaataaaacatttgaaagatttgttttatcatttgtcctaacaaatgtaaatcatcagctaatatctaaatgatcattgttaaaagataaataaagataatttattaaaaattaaaatcatcatgtgactattaattaatttttaatcttaattatttaacgttatatgactcaaatttatatattttattcttaaatgtttacactaaatatttccccttcaacctttttcatttcataacatattttttatatcattttttttattcatttttttttaatttccttatctatccgtatcaatatttattttttcaattaacattaaatatttttatttcaaaattacaaattttaaacatatatttaataatttattttatatttatcattaataaaacaacaattctttactttttaatttacattttcacattttatgtatacttatataaaaattaatatttattaattaaactcatgtttaaattcatcaaaattaaaaatttcaaacacatgtattttttattttttattatatttattattgataattatttcattaataaaacaattatccatttcttttttaaaaatttgattttaatctatataataatgagagcatctataatgagagttacttaaaaaaattaaatattattttagtgtttctaatgtgatattgaattaatttaaattagagagttatttatataagtaattatcattcacgagttacttaactttatagtaaatataggacatataagtaaaatatttgtgagttagacaacttattaatataaaaactattagagagaaaattaattgaattacataagattgaagtaatataaattaagttacttacaaaaattcataaagaataaaaaatagaaatttttaatcattgaaattgtattgaaaactagtatttgacctgcgcttacgcacgggttaattatatattattatgcacattatcgcgttaaacagtttaagattgatcgaaaaggtaaagaaaaatataaaagcaatttatatagatagtattatccatacaacttatggacataattaaatagtgcaagataaagcagataagtttaagagacagtggctacaaactgagacaacttctaactgaaccatgtagtttctattaacatgcatatttaaaagctgacaggtaagagctgttttttgcaatcaatacatccaccagtgtactatgttgctacttgggtatgaaatctccataataaactcgaagtcagcttttaaattgttggctcgtgcaaaagctttccaaccagctcctattttagcactctttctctggtggttaaacataatcttgcatgttattcttccttcaaaacagacagttgtgaaacctgtatccttaaggtagtaatacgcacgggttaattatacatttaaatgcatattatcgcattatgtaaaattggagatgaaaaaagaaaatataataagattcattaatgtgaaatataatatgcaaacattgtaacataagtttataatgttaattacaaaaaatatgaacatcaaatagaggtagttaaggaacacaaaaaacaaaattagaatttttgatttggttgactatatattttaaatgcgtgtaatgtaaatattcattagtaaaaatcatatataataagattcgataatattaaatataatgtactgaaatgttgatagatatagttaacaaaaataaaaaataaagctagagttcaactttggttgagttgaattagaaaagttacaatgaaccaataatccaatgcacaatgttgtttgttagatatgaaaactccatgataaattattttaaattaactttaattgtccaataacaaataattaaactattattttttaataatatattaattaaatattattatgtggttattgtaacaaataaattaaatacaaagagtttaaaaatttcaaatattgattaaatttaaataataacactataaatattttttttaaaatgtcaccacttaaatttactgttatttatccattatttatatgatgaaaatttaaaaataaataatatatttaataaaaataaatattgttgattgtttgatatgtaattatgaaataatgatgaaatctattgattggttaaaaaatatgaaataacagaatgacatattcaaaatgaaagttatttacaaaataaaaaaaaatcaattatattaattataaaacctgtaattattatgttagaaaagaaattgtccttaatgtcagtcttgatgtaaaaaaccatagtttcatgcatttaattcactttacaatcaatcaccttatccagaaagaactgaaagtagacaattgaaagaagacttccaagtgcaggaatgctagtggtcaggatcaaatttatggcattaacatacctgcaagaaaatagtacagttaaactaatgaactttgtctggaatgataatcatttgctaaattttattaaggaattcaactttgattgatcacaaacacactcaagaataccccaagggacatgtgtcattgcagccatttccatgtcaaatttagtttccaggccatggactaaggtcactaatgatgttgttataatgaccgagaattcatcctgtataattgcatagttctgttagaatgggagctgtatcaataagaaaaaaaaatcatttattgagaaggcattgatacctgcacttcagacatatccaccccatctgaatattgagggtcaattattttagaaacattttcaaaaagttgaccattttttgtcccaagaatgacttcctttgtggaaactgtatttaaaaagtttattcaaaacatcaagcagaaaagaaaatgtgaaagtcttatagctcagtccaattgaagaaaactgtacctaatcaaactgacccagaactttaatcgcgatcgaggctgagaaaatgagacgaaatgtggcgctgacacgtagcatccgaagctaagatttattgtgagcctgtcagctggattccgaagctgagaatgcaccaaaagttgacacgtacccagcaaaatgttcttttattactgtaatgtaaaaccaaaagaataaaccaccacaactggagcataccttcatcatcaccaaataaactgtgtttaagcttctcctcagcagttcataatcatgacagcattgcgcattgttgaaattttaaaaaataaaagacagatttatatgtaattataccattcaaacaatatgtggcacacgcatatgattccttcaaactcttgggagtacaaccacattacgtattaatgctaattgctaaactccaacagattactatataaaataaggaaagtcacacctagtaataaaagtttctgaatatgctttcagcctttgtttctaactggattcttctttcaatttctgcatcctgcaaatgcacgactcaagtttatgaatttttttttgattaaattgaataacacacctgtttcaaagaaaagcgtgaataagaatagagaaaccagacatgatttttcattcatgccaagcataccattgttccaatcctttaaatgcatttcgtcctaaagtaatcggtatcccaccaaacaattgcacaacttgcacatgagtgtatcaaaataatttgtattctctgatggcccaaaagagcaatgttttatttcttgatactgtataataaaatgtatgtgtcagtgaatgaaatatttttttaaaaattaagaaatggtgcgaagtacttcaaattagtccaaactcaacgaataatttgtttcattaaagccactgggaaggaagcgagtagattacttaccttttggtatacaacaaaaaaattgttaaattcatcaaatatgcgatctttgatttcactgctctgagtatcagcaaatattgaaactgcttgctttggagggttaaacacactctctgccactatactttgtattgcagaagcctgtaataaaataaggccctatcatgaacatcatgcaatcaacaaaaagctcatttaacataccacaaagcaaatattcaaacaattcatttagcccaacagggaaaccactgaaaaccaatcaaagaaaacctattaacatttctaatttgagatgcatcaattttttttgcaatgaacacgttcattacacaaagttccactcaacacagacataaggaccaatcctgacacaaaggcctgattacagcaccagctcaccagctttatgaatgcaagaaagaaaaactaaaagccattatttttctattttgagctaccttgccaggtgaaggttcgtgtccattccagaaaacataagtctgaatcacatccaaacctccgtccttggccttttgaataagatctgcccacatctgagaaacaaagaaaccccacaagttactaatgcaaaaaggaagaaacttttaaggcacccaatatatctatatatatataacaacaaagctaccgcatcatcaattcaaatctcaaaaaagagccacacaatatacctagcttacttccaaattccaacaaacattaataaacctggcagaaaggaaaaaaaatataaaatactactacgcacactgaatgaaatcgagtaatagcatctttagtgaaaaggggacacaacacacatacaaagaatataaaaaaaatggaacaaaaaatcacagcaaagcagaaaccacaattaaccacaactactaatgtaaaagcaaattacagattcctattccatgacaaaaaaaattagtgaaaatctttgtcaatagatccaaccaataagcatgggaaggaaataattgatgctgatattctgcgatgggcaaacagcaaagtcatcagtttgggaagtcaaagccgaatggatagtttcaaggtgttttgaatgtatataaaaaaaaatcatacaagtatctgctgcaaaggactgactatcatgttctttggtttacttttccctgatcttgttcattattaattattatttcttagaaatactaatattttgtttgtaatattagtaagatttttattagttttatgcctattccttgctgaatacagagctactgtacttatgtatgaaaaaaacaatcattaggggtcatactccctactcatctttacaaaataagtcttaaacatatatgcatgtctaacttggaatccacccagtagtcaggggaacaaaaaatgtgtcattttctcatcactcaattgaaagaagaaaaaaaaggtggaaagtttgagagagggaataccattcactggtatccagctggagccatagccgacggaagtaaagaccctattttttccaccttactctaccaacacaacattattgttccctcttcttaattctaaaaaaagaaaaaggaaaaggaaaaggaaaaggcagaaagcaaaaggtagaaatgaaccttgtggtctcttcttcagcagccatggctctcctcgttttccacagtagcacctggtggtagtgctctcccttgccaccaccctcaattccatctgaaaaaaaaaaccccacataacaaaagcgaagtgaaacgcaaagaaagagaagaaagagaacacactgttgtgtgagatgaaaatttatgtccggcaaggttaatcttctccttcatgaaaaccttagtgtcaaaatcgagcagcgcaacgcagggcccttgaacaccgacggtgcatcggtgaagctttagggttttccaaacgaactgttgttttaggtgagtgaaaatggatgatagagacaagagagtaactgagaaacgaaccgtgtgaaggaagaatagtaggtgaggattaaccagaaatgtcagcatttgagacgtgggagagagaaattgtctgattgatgaaggaaaaagagttggaggatgaagaagaaatttgaaatcttggagcgcggttcggatttgctgaaggttgctcgttgaactaaacaaagctgagggtgcgcatgtccctacagaggtttggaattggctgagaaaatgagacgaaatgtggcgctgacatgtggcatccgaagctaagatttattgtgaacctgccagctggattccgaagctgagaatgcaccaaaagttgacacgtactcagaaaaatgttcttttattactgtatagattatgaaaggatattgtactgcacaaaattagtaaaattattatgcattgtacacgtgtccattaccatattataataaatatacacgtgtccatcaccttgttatagtaaatgtacatgtgtccacggaactggacgttaacactcaacaatgtgtctctcttatcaacaacaacttatttgttgctataaccactctacacacttggaccatcagagtttggaaccaagttgaattcgtctattcaaatttccaggttttggtaagaataaatatattgttaaatttttcaataaaaactttagacttttaatttcataagagaaggctaataaacattttccatataattaataatgataaagttgaaagaattaggaaggacacgcacggtgatagaaacgagcgttttagtttgcatgcaaagcatatcatatcatgtgtcgcaggctccttccactacgcaccatttcgttgcatgatagataatagtaattaggaagttggcattacaagaacaagaacaagaactaaacccccactcactcacacacacacacacacacacacacacacatatatatatatatatatataacactcaatgcacataataatacaatttcttagagagtgaatgacgaatttacccgaatccgcctccacaagcgacgcgtcgtctggagctccttctgccaccggcgaggatcgcagcaggatggcgaatgtggaaaacctcgttgtcgaactcagcaatccttctctccgagcaaactctctccatgagctctccaaggtagtacttaccttccgtcgtttttccgctctcattcgtcgttttaatagtccaattaagtactgtataacaccccatttacaacgccccattattccatatgctatatcacatgcgtcgtcgtttcaaggctcacacggttaatattttatatattttagatgcgagacttatttgaggatcttgctccattattgtcgaaatcttttggtaccattgcagcacttttactggtattattacatattccttttgtcactcctagctttcttttgctttttttattctttcttgtcttttatatttttttattaatgaatagccccataaataatattttgtttcttgaataccttgtttgtttcaaatcctagagttttatgtatagtcttgaaaatttggttgtactttgatgcatttttgtttgtttcaaaaacaattttcaaaacttaatagattttagatgatatattcattgttgagtaatgtaattttttattataaaaagagagaattaaacatgctcctaatttgtttatttttagttttttttttctcaatgaagaggtgcttctttgacctttgttgcccaccactcactaggatttgtttcttctttctaggaaatagtttcagtatactctgttatttcagctccaaacatgactcaagcacaatcaactcgagtgtgcaaagctcttgctcttcttcaggtgagaattgatatgtccttgtcctatcaagttttatatcgtgtgttcaacatatttcaatttgccccaaatattattttttaactctaaaaatcaattggtttgaaaatgagtccagtccatggttctaaattgcagtagccatcgccgggcatgtaaaatagaatagaagattgaaatctaaatctttttattttttatttttttgggtaaataatcattttcgttcttaaatatgtagagtgctgataaattcattcccgtaaaatgaaaattcaaatttttgttcctgaaagtgaacaaaatgtgacaaatctatccattttattctcccttttctaattattgtaagcataaaattataataaacacttaaaaattaggaaaacaagtataagttaaaataaacataataataaatgtaatattgattgataagcataatttgtatgttgatctaaaatttatattctaacaacattagataatgacaaaataaagttgagtttcatttttttgtaaggattaatttaatgattgtattttaatttgtttgagtctcatattttaggtaaggtattatctcatatttttgctttgaaatttctaatgtgacagtaatttatccaaaatataagaccaaacaaaaatgcatagtaattaatttaattcttaccaaaaagatgagacctaacttgattttgtcattatttaatgttattataatagatattttagagtaacaaataaattatgtttattatacttattattatgtctgttttaacttatgcttattttcctaatttttaaatgtttattgtaatgttatgtttgctgattaaaaaagagagaatatgaagattaaattatattttgggtaaagagctgataaatttgtccctgaatatgtagtgcgttaacaatttggtccatgaatattaacgataatatatgaaaattaatggagagataaatttgttatatttttttcactttcataaacaaaaatttgaattttcatttttcaggaatggatttgtgatttttttttttttaaaaaaaaaaaagtggaatagaacggtgctaaggttccgttgctgctccaatatggttctgttgtggctaggtggcagcagatgcgttgcggaattttgtgtgattgaaattcacactgcaggttgcggacaacactgcaacaacaatattccgggtgcaatttagaaccatggtccagtcacatatactttgtcggatctttttctccttttcttcaatgcattcttactaacacatatcttttgcatggattttttacagtgtgtggcatctcaccttgatacaaggatgatattcctccatggtaatgatattttttcttattcatctgaagaccgtgaacttctgtttgctaaataatattatttatgataaatagtatctttgaaaataattgttgatatcttatcatctcctaattatattttcaataaatataaaatgattgttgatatcttatcatctcctaactatattttcctttttttatctcactaataatttttcttttgcatttatttaaaattgttataaaatattgtaagagcaaccaattgctaacaattaaaaagtaagaaataatttgttaaactataaaatttcatgaaagatggttaaaatttttataaattttcttttgcattcatttctctcattcttctttcaccctttttctttctcttttccttcctttttttttcaattttttcgtatttatcattgaatttatctaccatcgactccaattaacttgaattaaaggtgttgttgatgttgatgattaaaagaccatacataatctaaaaagttttctgcatataaaacagaatcatgcagacaaattttatatgcaacttgctctctctctatcttatcataggacttctactttatcttactagaaaatgaagtttctccctttcaatttataggtcataccacttgttcttctttcttagcattcagtcatacttatattttttttttactgtcaatatactttcataagcatccatggaaagaaacttttgggcaattgaaaggcatattagttgttcttttgttaatataaaattaaggagattgctttgacattaccatatccgtttcagcatggtttttgctcattgaaactaacacttaaaggaaaaagatattactctgttcactctttacacttaccttcttgtcatctgcagctcatatacctctatatctgtatcccttccttaatacaaccagtgaggccaagccatttgagtatttgaggcttaccggtcttggagtcatcggtaccttagtgaaggtgctacatccttgctgattctgttattgaatacactagactatgagaagaataattttttatacatcatttatgctgaacagagaataatttcaattagtaaattattgtcacaataaaccttgccataaaatactaaatactggaataacctcaactaatatgtcatttaaaaaacagtaataactgattattgattattataaatctatggcacacaggtagatgtgtaaatattttagttgccacaaataattagtcttgttataatcttataatgttcatgtagattttcaactatttgttaagtttcaaattgattcctgtaataattttctatgatgtaacaggtacatacaaatcaacttgttaggattagttcatcgctagtatcagggaacaaaattttccgaactattttatgcccttcaagatattgttgatttttttttcctagtgggatgaagctattgttttttttttttttttgttgcttgtcacatgtacatttatacttgagttttgtcatgtgtttaatttcctttctgttgatatttcaccaggttgataatacagcagctataagtttccttatttcaacagagattcttccgctgtgcctgcgcagtatggagataggcggtgaattgtcaaaaactgtaagtttactaatcttgttttaaaccaatttggttcgataaaatattttatttggatgaattaaacttgatttttatttgcttcatttttctgagctacttttttttgggtatgtatgatgaacatgtatgcatgtgaagcatgttccaatacaatgctacataggaggtgtaaggcaattagcataccatttatctgatcaatgagattaccactgaggagagtggtcttggcataagataaatggatactatgtgaacttggggagggatgtcatttaagaactctctttttttcatcttttgaactgttggtcttaatataagttttttattttacggattacgagaaagacaaaatcgatattacactgtacatactgaatatattagaaaaatggctggtgtagaaaattaatcccttctttgaattggtgggagtagatggaagaatgggattaagatccattgtttgtattgaaaaataaacaatggaatagactaggaaagtcatggaacccattccatccaatcctatcatttttagccgttttccttcctcaccaaattggggtgtatgcaatgaaacggtaaatatttttctctctcaacgtcatgattataatggttttgctccacgttgtggcttgtcctcaaattcatgacaggtatatttttcagtattttatttcgctgcgttcttattcttccttccattcctctccaacttgccgcgcacacactcaactaccaaatatcatggaaattacgtagatttaatatgaaaatttgataccttggcatgggttgcaagcaatcaaagaataaagatgatgttgagagagtgattgagcaactccagtaaacacaggaaataaagataaatagatgagattatgaagaatggacgtttttttttttttttttcaaaaataaaaaacttctcttcatctatgggtaaaggagattgttagagattaaagataatatgagagtaaaataattattcatttttttcttccaaataatagaatgaaaattttgttccattctattataatatatgcaaccaatagactggaaattttattccattatattccactttatctcattctatttctcttcatcaatccaaacaagtccaaaactcaccaagataagagtgaagaaccaattcgatcattcagttgaccaatagaagaatctcctcaatcaaaacccattgaaacctccttgatcaaatcacaactaaacacacaatataaaacatccaagaacatacacacagccaatcatgaactaaaaatgagaaaatagattgaggttttaggatcttaggtaccaatgagtggtccagattcactctccatctaaacataaatttgagtctttagattttaaataattaaagaataggaagctctacttgatcagaaagcaatacatgggaaaagtcaacccttcacaaattgacagatgtcacaagaaggttgaaaagttgatttcatatggatcggaaaaaattgtcaaagaaaaaaaaaccttgatttcatatgccaaggctgcgctatggtctaaacaatagccaatcacaacagaagatggaagacaccctaaaattacaacagaattctcttctacatataattagattgctgtaaggcctgaatcatcaaggaagcagcagagttttctgcatccttcacccgagatttttcatcccctgacatttgaagaataccatcagcagttggaatctgaactgcgcagacaaatttcttttcatgagagggacctgaatccttttcaatgctgtgagccattgaagagatgcaacaagttagtcaacaaggaatgttaaaagtttcactcacgcatgcaactgaactgaaagaaaatcatgttaaagaacagtacatgtactctggtataggccattttttaaccgcacaaatctcacgaagtttatttttgggtgcttcaacaaccaaggtaccattttcatcagcagtaaagttgagattcatgttagtggcagacttcttaacggtggaaggcaccaaatgtgcgagtttatgcaaggcaatcttggcagcttcaagctttgcatgatccttttgagaagaggaagcagaggcaacaaactctccaccaacaaacaccttagcaacacttacatctccttcccttgactgttttatatcaacctgcttccccttcttttggcacatctcatacaacatagtcactggttgaggctgtttctccaaagcatccggtgtcactattggctccaaaacacccctcattatctgccacaatcacaattattatcacaaatcaaattttcatcatcttgaatcgtacagcaacttcaatgtaaaagtaaaagcttattctaaaaatcatttataataggtgtcatcataatgaattggttaccacaaataacaatcacaattctttttgtcttagaatatgagtttggacctaatttaatcccaaaaactagctcatagggtgaggattattccccacttatatagtctatcttggtaaaatctctagctaggacttgggttttccccaatacaagccgcccagcatttttgggcttgaatgtgagtttggatccaattcaaccccaaaaattatgagggtcgttctcgacttatatagtctatcttggcactatctctaacccacgtgtgaattggatttttcccaatattttgtctagaccacaagtatcttctatcggaatgcaatcaaaatttaaaaccttatcaaataatcaaataataatttacattcattcatcgagagcacaagcacgcaacttaaaaccttatctgatttgttataaacgtgataacgaggagatataagaatagcttggcggtgaaagaaaaagggagggcggaaggaaagaaaaactaacatacaactaacataaaggtgatgatgaattgataaaaggtacggtaccatccatagtttctgaaggtcgaaattgacgtctacgtaaaccgcggcggcgacggactcgacgacgtcggcgaggaccttgggggccttgacggaaccgccgtgagagacggggtgattctcgagcttgacggcgtcgacgaagcgctcgacctggtcgacgaggggaggggcgctgtggcggacgtagcggtggaggccggtgcggacggcgacgcgggcgagcttctcggtgctgatgttggcggcgcggaggagggagagttggccggggtcgagatgagggtaagcgagaaacaagtggttgctgatggcgagactgagaacggggtctccgacgaactcaagacgctcgtaggagacagcgtccacgaaggaggagtgagtcagggcttcttctagaatcttcctgtttcgaaatccgtaccttaggatattctctacttcctccagcaaacacacctccatctccgcaccacaaccaaacaaaaacaacacaacactcactctcaccacactctctcacttcaactcaccaacaaggttttttataagtccttccagattttttttttatttttataattttaaaagtgtgacgaaagataaaaatatgaatttaatttttgaatatataaaaaaatatgataaattagtctcttaaatttataagattatttttttattaaattttaatatttaagaattaattttattataaattatatttttaaattaatttgatattaaattataatatttaaaaattgatttagtgtcacattatttataaaattaattttttatattttttatatttatgaattttaaatttaaatttttatcttttaaaaatcaatgtcatacatttttataggcgaattttaatatttatcatttttttaattacctgaatatattttgattttttttctaaaatcagacacgacataattgcagcagtaaaaattactataaaaagacgaaatatttttttataatcaattgatattttataaaattacttcataaaactagcttaaacacaaaaaaaattaaatgtatattaatatatatatatatatatatattgactttgaatataataatttataaattattgaataaagtatatttgacaaacaatattgttataacatttgatattatcagtataatattaatataaatatataaataaatagatttttcatatattttatgacataaatttgatatttaattaatattctataaaaatatgtttttcaaaaaaagtcaaatggataataatacaatattcagaaataggtatatatatatatatattataaataaatattaacggtcatatagtaaaataattttatgaaatttcaaaaagtattgatataaattactttattataaaaataaaatttaaaaacattcaaaaaatataatatacccgtacatacacaataacaaatctagtcatgtcaatgcgtgtttgggtaggtacggtcaccacatcttacttatttttccattgtcacaactcacaagcaaagcaattttggattttttcttcatttttaattattcaccataatttttgggactaaaatcaattttatttggaatccaaacatgcacacaatggctcttgagtataaaggcggataatctttatctatttaatgtagaaacaatgtacatttaaggaactttacaatgtagtttttattcttaaaacgcgagtgacattatgacttttattttgtggtccactgctttaattacatgtgaattcccagcttttattttgtggtcgatctattgctttatttacatgtgcttaatcatttgacatgtgttccacctctgcaaagacctgccaagtcggagttaggacttaatcattggaaacttatctcaacataatttggacgacttacaataaacgtttataaaaatggtggcaaaattttcgtcttttaaagaaaaaaaattgtttagttataaaaaacatgaatacaattccttttaaaagaaatatctgtggcttagtagggcaataacatataataaaaaataaatgaatatatgccgctggaaatctaaataccttataggcaattatttatataaaaataaatatgcttaattaatcaaataaaccaatagttcaatggctacataaaataagggatgtgcctctatgactctaagatacctgatagacaattataatcaagttccaaaataagatatcttaacgagagcaaatcaagtagaggtaaactaagatattaatgtaaatttaaggtttcaaatatttagaacctaaataaagaagttgaagttgttcaaaatattacatggcttctaaggccatgagagaacaagtatatatacatgaatcatacttaaaacaactaaacctcattcgacagggcatcttatctttctctatggttgcctggttcaatgcccaaaaattcaggtatgaggtggattttttttccttttcttaaaattaattaatataaagaaactattctatgtatatgtcatattttaagcaattgattgtgaaacatacataggaatgttcaagaactttcttgatcctccaattcactttagtaaccacaatcatcctcagttaagtccatatgttaatcattaattaatttgatcatgttccccctcctctaaactttggtcattaacttagctttagatatgtgatatttctctaatggtatttgttttctcatttgtaggtcttaaattgttctgataatattaattattttattttcactttgactcaaataagatgttcggtaaactcaaggattataaaaattagaagagacattcaaaggcctccaaccatacacaaatccatgtttaaatagtaacacaaaaaaagaagattaaaacgaaatttaagttcatggtatcttgataaagtttaggaatcaactaggctaaaattaaaatttaatatgtctatttgtagaagagataaaatttaaggtgcctaaatactctttttcctaaaaatatagtaattgaaagagtacattagtatttttttaatgttagtatttttttaatgtaataagggttagaattttaaaattctgactgcacagttaaatccaaaatattgaaaaaattaggaatagttttttaatttattttttaaaacaaatgtattaataatgattttttattctcaattgttaatatcattattttaattaatttaaatattagaatttatatgttgtaaaaaaattaaaatttctagcctaggattatgaattttttaataaactttcaatatagtagtatgttataagtggatggttaatatatatgtagttcggatggtctcccactcccgcatttcctgcacaatttttttccatccaaaatctcaaccgaacatcaagtcatctctcatctctggttagtgtagattcttccattcaatggttcatatgttgttaaatcgaaaaacagaagttttgttcattgtgcagcaggctacaaatgatctgcatgctaaaaatatacacaagatcattcaatggattttgcttgcacacacaagacttgtctcttttgcttgcacacaagtcgaatcttttgcagttacttaatttagactcatgcttgcaaacacattgagtaagaatggatatgagttcttagattgtgctcggtctccattgttatatatattttagataatgcatgatgaacctcaattatcaattctattcttgtactccacaattcagaaaagaaaaagacaaatctttgatgtgagaattgtcttttttcatttatttcaatttagttttttgtccatatatctagttctgttattttattcagtttagcttgcagttttatatacgggctcctaacaccctttttgcaccaaaaagctgtgatcgtacgtgattatcttatacatttgattttctattatttcttcaaatactgccaacttgatgtgagtgtggacctcagggatgcgaatggaaggtcgaaatctaaatcttagttgtaagtttttaccttcatttattgtttagactttagaagataaggttaatctttactttggaatttagttttgtcatatctgccaatgtttttgagatgggaccatgaatgaatgaaattaatatgaaattttggttttctttgaagatgcaagggagttgaagaatattggtgaaaataaaccatcaaatgccacacatcaaacggaaatggtatttctagctcgaaggaacgaaagaatatttgcattttaattgatgaggatgacttcatcattatctataattaatctttaaaaaacgtactctatgcaatctcactattgaaattgttttattctattaccaaaaaaaatggtaaacaaatctaaacatttaaatcgggcaaaaaattacaaataatacaattaaataaaaattttggcaaatggtgtaatttggaaacaatttagaaaatggtgcaaccaaacacgcccaaatggggcgtatttgaggaggtggtgacacgtggcagcaaaaaaaaaggggcgcgatgttttcgtaaacttcggaaggtcataacttttgactgggacgtccgattgatgcgaaaccggtggccacgcgctcgaaattgagagaaaaagcccttaacaagttccgaagaagactttcccaaaaaaatttcccaaaagaggtctctaagtgcctcaaatttgcgatttaatcttcggagccctaaaaaaaattttgttctctgatattttatctattcaattagtgaattgcaagctattctttatttatctaattacttctcttaatttcgagcattttgacataaaatacgtctcaattggacattgttacgagaaattacaactgttcaaagttatatgcatcgtcaattttacagtataattttggaaaacttttgcatttgggtgaatttgattcatattattaaaagaagacgaatagcacactataagaaaattaaatcacattacaacattttgttatgatgttgtttggttccccacttccacttacaacacaaacaattttataggtcgagcattggttcgacaatgttctttattttcaggagtttgtcaaaattgatgggtatttttcattaggtttaaacatatttttttatctatgatatacatccgaattttgtgtttgatcattgacaaatttttctttcgcatttgctccatggtatttgaaaagttttgttttggatttatgccgtcagttaagtgatgacgtatccattaaatatttgataacgcgatttgtgacggatcaaaaatcactagtatttatttcaaaatcaaatataaattttatgacaattaagaatcaccataataattaaagtaaaaaataaataaatcaaacaacaataatttggtcctcaccattggcgtcggtgccgaaccacttccaccattgcaacaacaataacatggtggcaaccacacaaatctagatctagagcaacttttgtctgttgtagtggaggacaatgacagggttgaagggggatcggtcattatcatggccttgtcgaagatctaccatgttgcaccacacgaatccatatctaccgcaactttcgtctgtcattgtgaaggatgatgaaggagttgaaggatgagtggtcattgttgcgtcgttgtcggagtttcgtcgtgtcgtgccatgaatacagatttggttcttaccccttcattggcatcaagccagcgtgcaacacaccattctatgaatcccaattctgctgcaaacaaggaaccccttcttgaacacccaattgaagtcattgccagaattcatgactgtccaaattgaaagggcaagttgccattcgttcttcaaaacaattccatttgtgagagcatgaatcatttttattccaacacaatgttcagaccgcgtatcccttgatggttcttggtggaggaaggtgagtgcgggaatctaacactggagatttgggacatgcgactatagtggcagaagcccacggtggtgacggagtgagggcccattacggatcgacgtcggtggagacacataggacacaagagtggttgaaggtggcagcgcagaggaggaggtggtcacggaagagggggagaaggaaaggacattctttttataacaaattgagatttatttatttttacttcaaaaaatttgagatatgttttaaatgtgattttgaaagaaacactgatgatttttgagccgtcacaaatcgtgttgtcaaatatttaacgaacatattatcatttaattgactgtagagatctaaaacaaaactttttaaatatcaaaaataaatgtaaaggacaaatttattgggcatcaaacataaaatttaaatatatatcaaagatcaaaaatatatttaaacatttttatgtaaaagaaaaagttgtcccataaattatcagttaacaaatatttgaattatcgtctaatacttcatctttagttttgtaacgcacaacctatgttcttttttgttttgttcttttaaggagaatacagactatatctcattcatccaagttatttaattttataattaaaaatagttttaaatgtatttaaacaaatcagaaccgttcaaattcaaattattgcagcatgcagtagttcgtatttggaccataggcaatcaaattccaattccctattattacacaaataaaaattaaataataaataaaatcaaacttatttccatatccctattattaagataaaacataaaatctaaaagataacgtcttacagaaaaaaagagattctcaagcaacattccaaggtaaattgaccccacaggaaataccaaaatataatgtctacgcaatgcctttatttttagagagctagataaagagacaaaattttgtattcttattagttgtcaaagatttctgtaaaataaaaaaaaaaaaaaaaagttgtgaaatattacaacttattatttgctttaaaattaaggggcaaagaaacttacaacctagtaaggttttggttgtcaccaacctcaatgaaatgacatgtgcatctgtgcacactaatataattttactattgtaatttggtttttctttttgtcaaaaaataaagtagagtattaaaatgttgaatttctaaatttaatgtttttctggattactaatagtgtaaaaatatctccacactccgctgagtgttgtatttgtcaacctcttaattaagctgcatattaataccgccgcagtaagatattgaaatttagtgctattctaatactgctgcagtgccagtcattggacaaatttggctgtctattctttgattctttgcacacacaaaaaagaagagataatgtgttaatagatatattcttatttatctaaaaggccgcgtctaaggtaaccaactaactatttcagaagagatggtaaacctagattcctttgattgatatatataagaagttttatgcaacaagatgatacacaacacgtccactgtgtctctaacatctagtatattttaaatttatgtctcactatcatataaataatgatatgggtctttaccaacattgtgttggtcttgagtttaaactttataataaatagataaaatatgatcacgagagaatattttattaacaaaaattaattattaattactaatattgataaatattttatagtacaatataataaaaaaataatagagatctcataacatgtttacctcatgtgaaatagacaggggtctataaacctatctaacaattaatgttcttgatgttaagaaaaatatttgtgctttttcggacgacaattggacacagctagtaaatgcataggatgagtgcattgccattagcatttagcaaccttaaatattaacaaaaatcgtgcaaataaaaatgcttttctcattgtgccaattttttattttcttttgtaaaattcttaaggggacagaaacatgataccccaaattagattaagaccctgtccactgtttagtttgagcaacgggtattaacaactgttggatcatatatttttctgtatatatattgttgataagatggattagacagaatcatgacagatgtataatcaaaataaggcttgatctttgtcaaattgaacactcgtcgtctttctttctttttttatatgcagctggcactatcaaacattacctggcacttattttgggcatgaagtaacactttaagaattctgcactgttttgaaaaaaattcgtccaattacatagaaaaatatccaacatgctgtttttaataagatatcccataagctggtcacgtcatcagttatcacatgacttgagaaaaacggaaaccgactcaaatagagctaaagaattaatattcttatgtattttttatttttactagttgactctaatagatcaattttgtgcttaattaactaaaagctagtctattttgacatgttaaaagtaagtagttgcattcaactcataaatggttagtgagaatacgtttccaagaactctttaaaactagtaatttataattgattttactaaccatgagtaatggttaaactaatataattctttattaaaaattacaaaaataatatattaataatattaaaaaaattctacttttgattccttaagcataatactataaacaattattaataaaactgataattactagttaactacttaattatagtttgtgcaaaccattgctattaagaggctaaagtagacttaaagtttgatgagttaaacagcatcaaagtttgattagttatacaaaaatttggttaggagtgcaagatgcatgaattgatatcacataatctgcatactgcatcttgtactttataaaacacgatagatatgaagcatacatcataatcatatacgcagaccccagtcaattattgatagtcatgcagaaatccagttacaatataattacatatgtcatgtcttaccaacagtgaactccaattacttttccagcctcccccggtcttattctcttcagtcgtctcccattaatttaagcaggaaaaaaaaaacaccacagtttattttcaatagaaaatgctatgttttaatgacatgcaactttttaattgttggagcatgaaaatagatgcagtaaaattcttttaacaggaacttagaagatgataatacagattgaaattagtaaacagacctgacctctaattccaaattagaatctgtacaaacccagtgggttaaaaactaatagaccctcagaaccagtgtttctaaatttaacaccctggaaataatttattaaagagagaaaaagctaatgcgttcctaaaaggcttcctgataaagccaagaattctctctctgcatctttaactggttgtagaagttcccaatgaaggcctcagcttttgcaaacagctcttgcccattaactcccccaacctcatcttcagcttcaatctcctcatccatgacttctccttcactttctccacctcctatgagcaaaagatttggcattgaaggacactttttcacctcagtgacaccaacaatcttctcatcagaagcaggcttttcaacaaccttaggcttcttttcatcatattctgaggcacccacttccaccctttcctcaggttcatacacttctgggggcattacaggtttctgggtgacagaaacatgttgctttttgtcttctaaaggcttagaaaaaactgagagaagaccagcttcagctccaagtgcaatgatgagaacgttaaagatgaagtaaaggtaggttggtctcagagaggaaggtaacaagggtgtgatcccaaggagaagagcaaggacaaagagcactagaagttcagatttgttgaatttgttcatgacttcggtgaatgcgagtgaggaagttaaagtggccaagaggcaagaatgaaataaatgataaaaaaaagatggacagaataaatgaataattaggggtagcaggaagtaatacgtaggaataagtgtatggggttctggacatataaatagaggtgagggagagaaagacaaacagtggaagcagtcacttgcatcagtgtatgagttgttgccagtgtcagtcaacaaaacaacaaaaatatttgtgggggctgaaaattccaacaaaactctcatacattatagtcaataaaaacatcattaggcaatatatatatatatatatatatatatatatatatatatatattacagtgcaatattattttagtggagagaacacagttattttttaatccattatttaaaagattaatcctacttgtgaaatgagacatatatattattctttaaatacgaatatagtgaaatttttataccattatgatgcaatatttgttaaatgtggtgtaataccctttaattataattattctttcttctttatttaaacgaataacataatcaagtaataatggatcagtttaattaaatttatttattaaaataagtatttattttaataaaaaaattattttaaatggataacataaacaagtaataatgaataagtttgtttgagcttatttattgaaataagttttattttaataaaatagatatcattctgtttttttgtgtatttatttaaataaaatttaattttctgtttattttaaaaaatcgtatctatttcttaaaaaaacatattttaaaattgttttttaatttaaataaattcactcaatattttgtctttcgttgataaaagtagttcgattctacattgtccaccaataatgatgttaatgaaatatttaatccaattcggatggaaattaaagccagatagatctagtttagtgatttactacttgcaaaccaattgcatgatgttgtgaactgttaaaagcgttatcaatgtcggcacatgaaagttacacaacacaaccacttggagcattttctttttcctatctttactctgtcgtgtagttgattatgtattttatccgaatgaccacattaggaacaaaatattaagttgagctttggcacaaaactgtgacaagatgagattatagcctaggagttaaacttgttacacagtgattagacgagaaacaaaacaaaaacaagggacaaagggaaccatacaagagagaaattaatttggacgttatttggatgttgcgtgataaggcctgtgaaagcatattcgtccaataaggttttcacttttttttgtgggcgttgatatgattttaagggaagaaggtaacctctctttgaactcttcttggtcctgttcttaaaagccgtcggagtggtgggtcccacggttctgatcctatgtgattccaccccagagaactgttaattaaagggtaggattaggacattttgattttggaccccctaataatcatggaaaagcccaactttcctctttttgttatggactgactaaaatttgggccatttttacacgtaagaagcccaaaagttaaatcccgattaaccctatttaaccaaggattttagaaatgaaagggtagaccaaggatattatgaacagtgttgtatgcacattaaccagagtcatttattcttaagccagctgaagtgtctaaagtttattaactaatgagactttttgtgtgtacaataatgataatgaaacttgtaatacaccctataagagagacatggacaagctaaaaaatgagaaaaggattgagcatgttatcaagaaaaaaatggaaagactttcatttgagaaggagaacatataatgtgaaaaagactcgcatactttcatatgaagattgttagagtgacaagtgtgagtatatttattggtcaatataaattgacatgttgaataacatataacatgaaaaggatccaccaatttaatgttttaagcttttgacttagatgtaatgttaagtttacttgaactatttgttcatactcattaatgaaagtctgccagtgttttaccttttcatgttccataacactatatatgtagttgaatccataattgaagtatcaaaattgtgcataattccgtgtatgtttcatttagcttttggcatttgggattcacgtccaacttgaagcatctaaatgttatttatgcgtccataacataaattccagaagcattaagttttgcctttgaggattattgatatacactctaaaaaccccgttgtggccttgttcaatcataggcatcctattgaaaccgttggttggctcttgcaaagtgaaaagtctaaagttctgccctttttcttctcttcgtacatgtctttgaagtctttcggcttgttataaagggaactgttggttagcttttataagtctttttgtatacagggagaaaattttgataaaagataacgtgcttgctccttgctggtcaccccaataataataaaaaattctttggaaagagaatgatgaggatatgagtgaagcaagtatctttcaaaggttatcgttttcagaatttaggttctaaaaggaatttaatttctaatgaaagaaaacgttttaattagcagttcgtaaataataatgtaaaaattgaaacattttttttaatagaagcaagattaaatagagttcgaattagcacgacattttttaaaagaatattcctatttaataagtggtattgacgatattaggatctccctaagcattcaaatgtttgaataaaattctatggcccgcataaattttgattttcttttcgtttcagctgaatcgtagaattttaatactcaaatccatcggttgtttggctttttatttagaaaatgagttatcacctttacgtagaagaagaaaaaaaaccaattttcctacaattcctgcgacagtggtggtcaatgtcaatgccaaatgacgatagcgagatgctaacagtgatctagcctcgacaactgtgataaggaacgcatataagaatgtggcaatattaatcatcatagttattggaaaatgtcataacaatgactttaaaattataaaagcaacaatggtaaattttaattttaacttttcaacatttaacaccatagttattattggtaaaaaaaaacaccatagttataaaatttcatgttcagaattaaaatatatctaatataaattagtaatattaattatgacatttcccttataatcaatatatataatactaattttgattttttttctaattttattttgtaatatttttagtttattgtttcattttatttttattaacttttcatttattttatgtacatttttttaatccttataattattttaaaaaaataacaaagaggattatagtaatttttacataatatttttttattataaatacatattatatagacaaaagtaatatatatatatataagtatatatacaaatataatagtcattaatataattttttttacttataatgttaataacctcacaagttttaataaaattaaaataacatttacttaacttaatttttatatatttctttgatattcattttttatttataagcataatattaacataaggtgagtctaattcttgccaaagccaataaaaataaataattatttaatttaattctaccttttgtatgcttcattggtactaaacttgaggtttgtttaagctaatcttattaacaaaagaaacaagaatatcttatcaatacttaacatttttttaaatagagatctcttgagtagtatagtgatatagttttttatttaatttttttgaaggaaaaaaactactcatttgatccatataattacacaaactttatcttttagtttgtgtacaagcacttttggattatttttagtccctacctttaaaaaataataaggccattaaaaggtaaattttgtataaccgtaaaagtaggaactaaaaaagatataaaagtgcttatatatacaaggactaaaagtgaggatttttaagtgtgaaatctagaagataaaatttgtacaagtataaggactaaataagtagttttttcccttaattatttaatggagggtaaattattttatatagtaaaataataaaatttaaatgagataaatcaaataactaaaagttgtcatttttttaatgttattttgcattgacaatatatgaaaattaaagtcatatcattattaataatttgtatataattaataatataaaaatagcattacattttttctttcgagcagtatatcgtacgaccatgaaatctagttgtaatttcaatgtattcaccagataagatgattaaaattcgaatgtaacaactatggtttgaatactcaattccaaagttggatgtctcacgaagtgtaccttaatattaattgcaagttaagaaaagtggactcgttaaggttaagcctccaaacagagggcagtgtctgtctttgtcttggtccctatgagtctgggagcggacaaaaaagagtgtttcttagtcttaagaaataagaatgatcccttcatagatgcctaatcttgcacgttatttttctgccttcttctgtactccctccctagtccccccacatcattcattcaaatccacatcacactagggaaataaaataggagacaattttatgagttaatttatttataatatataatgaactaatatattttatagattttattttcacaaacacttactattttaagctagtatatatgtagaagtctaatgttttgtttagtgaaggagatgaaaaaaaatattaatttaaattaaaatagagtataaaaaatttgaaattcacactatttgaaattgtctatttccctcttactaaatggaggctgagagatgatatgttaggtagtctataaacatcaacaatgcatctacaataagaagagtcgtgttatgggagagtgtgatccacataacattaagtatcgttttacatacaaggctcgtgcatgggggatacttgagtgagtcaagattggaatatgaggctagctagtaatcgacccaagttgtgatctaggattttgccattgttggcaaacacgaaagttgagacatatagcagggctaaattcaatatggtcaaacgtgaattatattcaaattataatgtaaatttatgaattaaagcttcaaaaggaaaaaaaaaaaaagattgatggaaaatattattttctaataagacccaaaaaaagacattaagtaaaatttatttctgaatgtgttagacaaggcatgttaaatgggtcaagaggcttaacattgcaattcaacctaccaaaataaatgggttgactattttcactcaatggataagtttgttttaccatccctactaacacttttaaaaaaggttggacatttctccatatttaatgttatatcatattcaagtaatcttattaatataataaagatatgagaagttataaagagttataagtttattaatataataaggatatgagaagttataaagagttataagtttatcaatttttttttttaaaatacatttgtccttaattgttattagtggtaccaatgaactgaatcaactcaaaaataatttgaaattcgagttgataatcagttcgttaaacttgattcataaattaaatgagttgaacttgagttacgtataattttacccgtttggtttatgaattgactccacacatgcacatacacacacacacatatatatatatatatatatatatatattaaatttttataattaaatgaattttctattattttatgtatgcatgatgaaatagttttatttatattaattttggttgtaattatgattttttattgttatatcttatagttctataaaactagaatacattcaatttttttctttaaaaaaataaacaattattttatttaaaatctactaataatttaaaattttaaaacgtataggatttaaaaatttggactattattcatattattcgaactaacgagcttaatcgagttattcacgagtttaaactaaatcgagttcgagctaataaaaactcaagtcgagtttcgaactaaattaaatattaatgggttgagttaaactcaagtgagctcaactcatttttttcccataattgttatttatgtattggtattgctatttatataaaataaaactttgtgtattagagcttgatatctcatatcccatctacccaagatagtagagtattgttgagaattgagaaatatggtaaatcattcttattagataagattaaaagatattctactatcaaaagaaaaacatgaaaatattttaataaactaggtcttgtgatttcttctttacatatacattgagaaaactttttaccttctgctcgtacacttatttgacttccatttcatgtctgttttaatttaacatcataaataggagaattaatttggtctattattaattttcaacacccaaacgtcctctcacgtgagtgtatagctttgtgcttttcagtggtgcacacatgcatcatgtggagacatgggttgaggattggaggattgtgtttgtgggctcagagaggaccagcagaaattaattaaaagagatattttggtggccattcaattcaccctcgaagtttcatggactggaattttctgtttgttggtagagatagagaaatttcagagcttcttcccatacgcattttaggttgccacaaattcgtcatcaaaattcaatatagacaagatatgtatatatacacagcaagacttcttcaagtccacaaaatgttataatttttatatacaaaactaatttatattcgtgcgtgagagaagatttacgtgtatttattttaacgcgtcattcttttcttctttctcaagttaaacgtatgtttttggattggttgaaaaaggttttgatggagactctagtacagaactatgtaaaaattatgaacaactttttctatttactggtggtatttatcaatttgatttaagtgattatttaaaaaaaatcatttcttaatcttagaattaatttatgctaattctcatattcaaatggatatatggccaggaaaattaataaaagttcaagaaaaacacaaatgaacgataactgaagtttgtgaaatatttgggataacattaaagtttgaaatgtttatttacgaaaaacataaaaataaaagcataaaaaatcgttgaaagtaatttataaacaaagttagagggggaaaaacctaacaaagtcaacatgatcgttgtgagcttgagggaacttcacgtacacggtaaatcatattaaccatttttatattagggtaaatagatattttgtcccttaatatataaagtgttataaattcatatctaaaaatgaaaattcaaatttaaattttagttatcaaaaataaaaaaatgtcacaaattcattcatctgttaacacgttaatgaaagagtctatgtggcatattcagagacaaattaatgggtgaattttgttagctctttacacattcaaagacgaaaatgactacttacccaaaatataatttaatttttatttttccctctttaattgttacaagcataatattacaataaatacttaaaaaaatagaaaaacaagtataaattagaacaaacatattaataagcatagtttatctattattataaaatttctaatataatagtaccttacacaaaatatgaaattcaaaaaaaaattatgataatgagacctaacttgtttttgttattacctgtcataataaaaatttctgagacagattatatttattaattaatattatgtttattattatgtttgttctaatatatgttttctttcctattttttaagtgtttattgtaatgttatgtttgcgacgattgaaaaaaaagaaagataaagattaaattatattttaaataaataatcattttcgttcctgaatatgtaaagtgcagataaattcgtctcttaaatgtgtcaattaggctctttcatggtaacggacaaaaattaacgaatgaataaatttatcattttttttactttcaaaaactaaaattttatttttattttttagagataaatttatccatactctacatactcatgaaaaaaaaaactatttaccatttatattatatagttatagtacttattttagtcttttcgtccacgggaaagcaagatttccacgtttttcagtataaattttaaatccgcgagaatgagttacgtcatgcgtgaagccgtgaatacgtgattggcaggctcatggggataaataagttacttgttgcgaaagttcatgtggtactgcttcagccaataggtaaatgtgctaacaagttacttgagaaagtaaaagaggattttttatgattattataatacataaaactacatttttctatcatttacagatacatttttgtataacttttaatatatttttaaataaattttccttgactagtttcaaaaaagcaaacattgattaaaaaaacccttggcaatatttcatagaaaaatattgacgtaaaaagagaattgtttcccagcataattgggattggtaaacacttcgatcggtggattgttatcttactagtacttctaatttttcaaacaaaaagaaagtttttttagcatcccaaatcttacttcagcggtggctaattatgaatctagataagagaaatgctactaacattgttcgaatatattctcttaaatgcagtatttttgttattaaatgaaatttatcatattctttatttaatgaaaaataattatgattttgtaatttaaataaattttaattaataaaaataagttaaaaaggattttttgaaaatttaaaatttcaactaataaaaaatattatattcaaaaaaatgtattattagtatttctcttaatcctatctatctaaatcaatactaatggttgattgacacatctatactcccttcatcctattttatttgatattttaacaattttttccattttgattgtgattttacaatattaataaaatattaaattttgcattatatatttaatcatttattgtaaagtgagaaaataaaaaatatacaaataaaaaatctaattaatataaaagacaaagaatatataaaaaataattacatgatatcattcatgaaatttaaaatattaattttttaggtattcagataaagatattatttccttttcgtctcaaactttggcataaatctaagctacgatccaataaaaagaaaaaggatctaatgaaaaatatttttaatcttatataaatgtagaagaattttttaataattgtattttagatataatatttattaatttatagtaatttataaatcggtcaacttgactcatgatgaccacttaatttaagaagtagtctataaatttatttttaatgaagtatgaccatttatgtaatgtcaaccgttcattagttaaaagagaaaacaaattatataggccgacaatggaagtggaagaaagattaattcggtgtaaaataaaaatattaaatatcatttataccataaaaaatttatgcctttcaatcacaaatataatatataataaatttaccgattgaagaattatgttaaaactcatgacaataacttttaatttaattattaaggtgtcaaaaaattacataaaaaaatacatatagatagtttgcttaaacttaaaaaaaaaagtgattttttattaaaaaatactttaaaaaaacttaaacaaacaggtcaaccattatattctaataaaaataccccatcaaggaagaaaatttaacggggtaccggtggagaaaaaatgaataatgattaacgtacgactggtggagaaaagatgaataatgatgaacgtacatatggtttttagacgtctagcgttcaacccaaaaacttggttaattatatgcataaatatgattaattttgttttataaatagtttaaagtaaataaatatgaatatatataatttgagtaaaatttgacaattagtgaaagaaaggtaaaaataggtattatagattttatgatgtaataaaaagagaaagataaaaataaaataagagatattaatgggtgtttaagtatcattacttatgcataattatgttatataattatcattaattttttataaactaataagttattgattctaatagtattaaattttctccctttgaatataagacttcatatttgattcttatgaatacttggtaccaatattgtatgcataaattttttttattaacatacaaggtaaaaaatcaaccactatcaaacattttaataacttatggctctattaaccacaatgtctaaggtgatcaagtgagttaggtggtttaaggttgacaaataatttttcaataatatttattaataaaatattaaacggttaaaatgaagtatttttttatcaatttatattttatattgtcttttatcacaccatccttttttcttgttccttggtccttttcctctctcgttcgctgtgcgtcgttattgtcgacgtcatcactaccttgttttattttcccttcttctttccctctcttcaatttgctgcattcgccatcatctaaaggactgagagaaacttgtagatccataaccatctaaaagtgagagttcaaaccattgacataacgacattaaaaactagagacgagcatcaacaccgtaatttaacaaatatgaagatatcattatcactcaaagcattatgacatccaaaaatagtgagaaaaactagtaaagaaaactaggtcattttcgcaaacatgttaccctctctccctcttcagtcgttctttccacctcccccaaatctggactctcaaaagtgttttgatgtcgttttcgtggaggaagatgagactgacaacgatagtgattccgatggtgagaccagtgagtccttccttgaggttgcagatggtgagaatagaagagaccaatgatgagggatgaataaaaaagcaaaagggatagaattaagtcacaaggattaaattgtaattacataccactataaaaactagtccagcatggatgaggggctaaggtgggtcaccgtcttcctaaaattttattaatataaatttttattatatatatatatatatattaaaaattaaaaaaataatttgacaataaaaaaaggttgtattgtataatatcatatgatacaatattttttaatattacattaaaaaatagaaaaaaatatttttgagattacattgcataatataatagaaatctttaagattatattacataataagataaaatattttttaatattgtattcaaaaataggataaaatatttttaagattgtattgcataatataaaatatctttaaagttgcattgcataatatgatagaatatttgtaggattgcattcaaaaattggttaaaatcatatacttaaattagtataaatagaaacatatttttgtgtttatagtatgcattccattctaaataatattagaactttagagagtttatgtttatctcattgagagaattgttatgagatcatatagaagcattttacaagtctgattcttaactctctatcaggatttaaagatacctatttattatcatagtggagttgtccattggattgattatccaatttggacatcgtattttttattcaattgggttttctacgctaaaactaattgtgtcttctttatcttttatctccatattattgttttgagtttgattttaaattctgaattttttattaagactcattagactttgtttgcttgttcatcaaccccatcttatttgcaatttgtctatatgtaatttgtgaattgtgatttgcctctttttgtatattagatttatattatctttaaaatacttttatttatgatataattttttttatgttcgtcccttcaatgaaattcttatgtccgccaccagcataaaccacattgcttactagtccatcgtacaaggcatcctctattaactacttgttagagaaacttaatcatgattagatattttaataacttaataatcttcactcttaactacttatgatgagaagaaaaaatagccatatttgaacatgtaattaatcatgtgcagcaatctaaaacgaataacattcttaatcacttgtaagataaagtattatataatataagattataaatcacttatctacatttatttattattaactatttgtaacagaagattaatcatacttatacatttgattaagtgtaaaatatgagtggaatgaatataccgagagaagattctggagtccaagattccttgaaacgggcctaacctaaatacctaaatacctaaatacctaaatacctaatctatcgcccattggttacgcccacagcacagcacagtggtccactggtccactagcgtctagcgaggcgaacaaaaaagtgaagccacctctctctttcaattattgtctcttctatcggactctgtttatttttccaccaaggcaattttttttctttccattcattcatttcactccgtacgcattattcacggccacatttaaaccacatctctcttctcttatctataaaacaagaaacaaaggcacctcatcctctcacaccacatccaccaaagcagagctagtttagttagttactcttttctgcatgttggttctctcaacaacgactcctccgccaaaaacagaagcaaaacaagattattcattatttttgttgggttgaatccccgggttgaagcgttgcagacatcacggctattctaagagtctctcgctccctcattcatgtcccaactgtacgacggaggacgggtagttgcgtaacttccgccaacccttcgccgcacggtgggcgtggtgctttgccttctgaaggtggtagcccttcagacttgctcttcctcgctggtggcggtgtcttctagtttcttcactctttttattacttttagcctacatactcttaaataagtaaaaaaaaaaaaaaaaacaacagactttgtgactagttaagatcgccgtttcttcttcttcttcttctactttcgttcacaaaatgatgctcagactcaagagggttcccactgtcgtttccaactaccaaaaagacgacgctgcagaatctcctcgtcctgtcggaggttgtggtcggaattgccttaaagcttgttgcattccaggtacttctttctttttttctttctccaactcatatatgcatgtgcatgtaacattcacggttttttttgtcatcaataactctctaaagttgagttggatccattatacatggctctttttttttttagttatttgtgttttttgctttgttaacagatgcaaagcttcctttgtatgctttcaagaaggctaatggaaaggatttggccctgcatgcatgcgccggagagcctcccctcacattcctcgactcacttcttcttggagaggtagatatggaattttgctcatggagaagggttaacaccatcttttcttgttaccctttgtgttaaagtttctaatttttttttttaccctttcatggcagtgggaagatcgcatgcagaaaggacttttccgctatgatgttaccgcctgtgaaaccaaggtctgttttgttttgtttttgtcttcctatgcatagatatatggatggtatgatttctgagtttgatgtgttttgtggtgattctgttgtaggtgattcctggtgaatatggtttcgttgcccagcttaatgagggtcgtcacctcaagaagagaccaactgagttccgagttgacaaggtccttcaaccctttgatgaaaacaaattcaactttaccaaagttgggcaagaagaggtcctcttccaatttgaagctagcgaggatggacaagtccagttctttccaaatgctccagttgatgttgacaattctcccagctttgttgccatcaatgtatagacactagcttttgttcttgtgggttcattgttaggcgttttatgtaataactgatgatgatgtttgtttgtttatcgattttcttaacaggtcagtcctatcgagtatggacatgttttgctgattccgcacattttcgagtgtttgccccaaaggattgaccgtgagagcttcctccttgcacttcacatggcagtggaagctgataatccatattttcgattgggttacaacagcttgggtgcttttgcaaccattaaccatcttcacttccaggtactggaagctgatcaactataccacttaatagttcgtgttgatgattccgctgtttaattctacaaatctgattgcattttggtgattttggcatgaatatatatgcaggcttattatttggctctgcccttcccaattgagaaggcccccactaagaaaattgcaagtttaaatggtggggtgaagatatctgaactgttgaattatccagttagaggtcttgtcttcgagggtggtgatacgctggaagatttatcaaatgttgtttcagatgcctgtatatgtcttcagaacaacaacatacctttcaatgttcttatctctgactgtggaaagcaagtctatctgttaccacaggtaaactaattcttgaagcaagtgaatttgcctaatctattttcattagttgtgtgggggtatttaccaaatggatgaacagtgttatgcagagaaacaagctcttggagaagtggatgctgagcttcttgacacccaagtgaatcctgctgtgtgggaaattagtgggcacatggttctaaagaggaagaaggattatgatgaggcatctgaaggcaatgcttggaggcttcttgcagaggtgtccctctctcaagagagatttcaagaagtcaatgatcttatttttgaagccattggctgtggtgaattggaggatgtcaatgttcaaagtgtcaaagaagctgatgcagtcagcacaagcgaacaccctactgtggtggtgggttgtgaatgtgtggttctacagtaacaaggctctaacattatgagcaaattcagcaaatccgcagtgctttaagaataattgctgaattgtgtcaccgtttaagtcacatagtagtgtgctgtgcttgagccttaaggtcgtgtgttgtatgtatttgcttttatctgcctttatgacgcgttcatgtgaaagtacgatgtaataactgctcacctgagtactgttgttggtgtttagaggtatgatgtatcataatgcttgacttgactgtgagaaataataaattcagtaatctgtttgtccttgtagtagttcttaaggatgaaatcttcacttgctgtatttctggtttccctttgtagtgaatgttttatgttatgggttaagaatttggcgagaatctttattttatttttattgctgttttttcaatgcctcttggctgtgcattagtgcttgatcgtttttagattttgatagaattgattatgaattgttgattgtttcagattttgttagaattggttgttaatagtttaatatgattaagaatgtgttgtagtacaagaaatggattaatgttgtaaatcatagaggctatcaatagattgtttaatgagttggtcttcaaattgattgcatgatgctgtcaaagtgctatgttgttttagattctgtcatttagttattgtatgttgtcgcttataaaaaagaaatcattacatgcttcaagttgagcatagtccttagacagtgcagaactttttaatttttaatttttaatttttaatttttaatttttaattcatgttaagttggttgcgttttgggacagggcacatactcatctcatgtagggacatctgccactcaaacgctttcagtaattaatgatgtataatgtagcaattaatgatttggtatgtatcttcctcaaaaaaacactgaagtattttaatttaggcttaattacccattgcatcgtcaatttagtagtattcagcaccggttcttgcatcttgagtattcggacagaatatcttcaacacgcacaaagcaaattctggtgatgtacttgtaaagactagcgttctaagtcagtacataaaggatacaaatgggtatttaaaattagagagaataccttatatcctatatgatctatttatattatttcctttttacatatttaactgatgtcatagggaatttgggcaattcttttaattgtttccttttaagctttctaaagcttaaagtttaaaactattttttttcctcttaagatttcataatcataaaataagataaaattaataagtatcaacattcagctgagcacataaggtgttacaatggactacaaacagaattgagtaagcttgaagtcctgaggtgcgtcaataatattataaaaataagcttgaagtgcgtggttggtttcacgttggaatgtctcaaacggccgttgaattaaaagttttgaatttttacttttcacaaaatgtgcatgggaatgtgtgtctgtttaatctaatattaaaccaaatgcactcgaaatcttgagactcgtcaatagtattattaaaactgtccgatcgtcgtcacatgtcgtctggatagctttattttattcactttgctttcttatttggtattctttcttgctttttatttatttttaaatcgtgcaatgcacatgtttttcaatgctaataaatcacaaataacatacggagattcatgaggtagttacaatcttttcagaaaggcatttcaattttcatgtgaatcagttcccttcaataacgtaacagttcatttcatggttttgcattcatcatcatgttttacaatcctaaatcacgcaaccttgttttgaggatcaacatacaaatgttaagcctctcaactcattatgcaaaaagcacagagctagctgacaaaatattccttctagtgtatatgtaactcgaacacatatatagacaacgtccaccgcccataacacgagatcaagaccatggttgttattcatgcaagaaaaacatgcccctttggcttgtaagaaaagcaatttactttcacataaacatgtatgtatgtatgtatatatatacatatatgtatgtatggatgtatatatatatggttccaaaatgctacccttcaagccacttcctcaagatgagtctaagagcacaatcttcagctcttgtaacattggtggtggtgctgttgctgatcaagatagagggaaatccaacaccaaaagaagtccatgagaatggcactgatgcctcatcttcatcaacatcattgatggagaaagatgagaaccaaatcattggatgcaggggaagaccactgatatgtagcagaggagagtttccaccaaggtctatatgctgtggagaccgttgtgtggatgtgactacagacagagaaaattgtgggctttgtggggttaggtgcacgttgaatcgtcaatgctgcaaccgtttgtgcttaaacacaaatgtgaacattttcaactgtggtaggtgtggaagagcatgcccccttgggaggttatgtgtatttggattgtgtgcctttgagcaagcagtgccaacgccaacgccaacgccagtgtcgccatcaccgccggtgtcaccatcaccaccagtatcagtatcaccatcaccattgtttcctcccgtgcctccagcaaagtcaccacagccaatagattaccaacctgaaatggattaagtattgttgtaatagattgtggatggggtctcttggttacctctcccctgctttgaagttcgtatctttgtcattctaaaataagtatttaagcctttattagggttttcatgtgcaactgtttgtgtcaagctgatgttggtatgaattatatgatgttgcagttacatatgatgttggtttgatactttctttgttagtagcaaaacatgttaattttatatgagaaagaacattataccgagtaacttcctggtttttgttggctgacagtggttgaaggaactaaaaggagaagtatttattgtggagaccatacgagtgcgtaaaaaaggtcatggacaacataatctaagagcactggttagcatttgcctcaatagtattattagattaagacattttaaagtacttatatcgatcatttaaatatgtaatataaaaatgacaaattcttacatatgatgtcctctctgaggtcatttataacaaacatgatatgccaatgtctaccagttatggttttgtaattcatgaatgctcgcacatcttcaaatttgaaattatttatattcagtaattgttacataaaaataaaataaatcatttatatgaactacagacacaattagaacaattatgtatgtatattcagttcaattcaattctgagcgttgcacattcatacaaaggacatgcaacatcttcatgttttaagacagttctcctccttcagattttttccttttcaggacattggttatgtgctaactgtgtcttactttccgcttacttgagcttgaccttgggacttctcagtttccactattctctttaaggagtctttgtgatttcgtttttttagctgtttccaggttcttcctcagtaaattaatctctctaatatagtaatgttgtctgtcgatcaccaatccaaggaacagagagaatcctgcccaataattaccattttataggatttaaaactcatgttctgcacataatagtatatcagaagtgctaaagagaaatctatattcattgatacttgatagaattcatttctcaattaaatgcattgtccaagcatgagtaatggcaaaatatgctaacaaaaccggattataaggttggtttggtggtgaaaggaaaaggaaaaggggaagagatcgtaggtttgaatctcttaactaataaaaaattaattattagtaactgacatttgccgataaaaaaaatgtcaaaatatgctaaagctacttttagttagcacatattcaaaactataaatatagcctcttcaaataattaatagagaattttattggtgggcatttctcaattctgtttgccacgagtcaagcctagagaaacatttatttgtaaacttcatagtgaaattttgatgatttcaaccttcttgtcacctttcagagaagttatgaaactaaacagatgcttacactagtacacgtggggtaagtaagttcgctttctgttgtgtgtaacaaaatagtcctgcagatattgtaactttgtaagcaaacaaggaatgtattttttgagtaattacccaagaaagctgcttccaagagacgatgtgccatcaacacctcatcagttggattaacaatgccagcatccttggaacgcttttggattttgattatagtatacacggtggagctcaagaccacacacatagttgctgctacagtttttgtgactaaggtgcccctcccctgcttcaagaggtctagccccatgatcaccaattttcgtattggatttgcaaaagataatattaagatgaatgctatttggatcatcaaaagtatgaataaaagttgtatcatctttgtagaacttcttaaatgttgatttctgtggtggaggtaagatgagagcctggatgaaaaataaactctttattttgactgagtaccatgtgtttataagctgcttttggagacttgtgaggttaggcgaagaattatgccatgctttccgttccaagaccgcagcaggcacagaataactttgaacaagaggaatcagtcccaacacgtttgatgagaataaaactgaatatggcctgcaagcttgagtgatctctaccttcccaattcaattatcaattacctctcttttcactttttcttgagaatataaaaccttgccttgatcatccaagactttttaccctgatttttttgcaatttacacaagcatattatatgcaatatatactagttttagtacctgagcaatacaaaggacgtatgttgaagcttggcaatgttgagaagacaactaacaataattgatatacaattattatttagaatgatagaatgaaaccactcttcatatatttatcaccatgcatctctcgtcaaccatttttcatgttcccagcaaacaaactaatttgcatgttgaattctatgcatatttttttggattaagctcttaattaacaaaaataaataaataaaagcattttttcacatgagaattattaacttatagaggctacattcgatgtggcgtatataaaaacccgggaattctagaaggaatttaattacggcagtgtattattgccaatattatatcatccccgctttcttggaccctatgatgatatgtatctgaaaattttcatccgctaaaaaatagtgtaagaataaagtgccatgaaaagaaatcgtcttattactccaggggcaatccctacagtatagttcatagtcgtttcatacaattttggagccaaaaactgtgaccctcttcatattaaatgagaggaatagtgggtagaaaaaacacaaccatgctgaattaatatcgaagggaaattgggatatgatcctaaagagtttgctcattacagattataaattacgggcagccgcaattcaaaacctaaacaaaagagaacccattatggtatttgaattttgaggtttaatttactccatttaaaattagaggttcagttcatatgtcgagcagaagcctgcgaggatcctccacaatatctttgatgcgtcgcagaaagaacactgcctctcttccatcaataattctgtggtcatatgttagagccacgtacatcaatggtcttgggacaatatttcctccaacaacagttggacggctcactatggaatgcatacccaagattgcagactgccaaaaacaataactgcatgagttttctttctaaataattaatttcatattttattgttcacaataattagcatcattaaaaaaaacaattatacatatttaactagtaagggaatagatcagaatatttggcttgatatttagaattaaactgatccttctgtgaaaacaaattgcatattgaagagttactggtgacaaaaataatgaccattttcattaaatgataaacaatgcctgaacctaccaagatagaaggaaagcaatcaatgattatgtacaatcatatacatacagaaacaacttcaaaacatatcgaagaatgtcttacaaattaaagaaaaaaatataatgatatttatcttagtataacttccaaacctgaggagggttgataataggggtgctcaaaaggcttccataaacaccaccattggatattgtaagagtgcctccagccatctcatcaattgataaagttccatcatttgccttctttgcaaaagcattaatctgcttttctatatcagcaaagttcatggtatcagcattgcggataaccggtacaacaaggccctggaatggcgattgagggtcaatatttgttcaaatacaacatgcatgttgataattttcatggccatgcaaaaaattgcaaaattagactatatactagatcactagtaaattagctccatagccatgacaatagttgacataagttgatcacagagatggctaagtttcatcaagacagtataatgattgattgatttctcaacgtaaacaaagtaaatgagaaaagataaaggtggctgataaaaaccttcggagtaccaacagctatgctgatatctatataatctctgtatataatatcatcaccatcaatgacagcattgacaatcggctgatgttggagtgcattaacagcagcctaacatggagaccataaaaagtgtatgaggaaatcaaaaagggaaaacccagctagtctatacttcagtaattagaaaacatactttgacaaagccagacataagccccaatttgactccatgcttttcaacaaaagcatccttataatcagaacggagcttcatcaaattagtcctatcattaagagcagagcaataaggaagagaatgataatagtaatccactatataaggatatgacaggaaacacaacatcaagaattgacaattaaacacatggaatcactctttttgattaagtctacataataactgaattacattcctccccctccccctccccctccccctcatttaatcaacagaatatcccacgatactgggtgttatcgcatagaaactactcagtggcataatgtaaaattacatagatgagcaaaaagctaagcataaatgcaagaagggaaaaatgcttcaaccccaatacatataagtcaatcgtttccctatcttcttctaaacaaaaaaataagaaatgtacaccaactaagacaagtagaaattgagagaatacgtaacaggtttgttgatctgacaaagaccaagaaaaattaacagaaatgtaatgactctccaatgtatcatagctgtagaggacagaccatgggttgaggacttcattaaatttagacaactgtgttccattagaaccatcaccaaataatgtaatagtgcatttttatacacacatggggtaaaaaaacagtttgagcaatattaaaatcatatgctacaatttgacaatcaacaaaacttacatatcaacttcattgaaggttgtcagcatagcaaacgtgttttgggaatctttcagccgtgtagcaactcgtttccgaagccttgtcataggaacctttgataacaatggaagacattaaaacaactttcatggttgctaaatataattcaggtaggaccaaaaatcaaaatgcctcactcgtctttctctttctttaggaggaagctggggctcggtgggagacttcagaatggcaggagatgctttgggcttctctttagcaggagcagtttcaactttgggagctttcttctcctcgctaaccttttgggttggctgaggagcagctttctcagatgtagtctcagatggggcaacgtgagttgcatcagcagaccttgaaatgattgctatcttgttacctggctcaacagtatcaccttcgttggctagaagctgcaaatcattaaatagatcacacaagccaaatttaataaaagagaaacaagaaagaagagagtaacaatttcttcatttcagggtggttgaggagagtaaaaacaatttaaatctatgaaactgtacctttagaatcacgcctgactcaggacttgaaacatcaattgtcacctaattaaggaataaaaacaaaatacagcattaactatttggaaatcaagaaaattaaatgtttataaccatcaaaatccttcacaaaaatttgcatgttgctttgacatagcaccttatctgtttcaatttgagcaattggctcgtcagcattaaccctgtcaccaggtcctgctcccatataacaaatcaaaacacgacaatcagtcaccaataattcataaattaacaattcaaatagatgacgaaaaaaatatacaggataacatactcttcaaaaattgtgccagagttccatcagagatagattcagccaaaggaggaaccacaacatcaaccgtatctcctttatcacaaatataaattacattagcaatcttaaaaatattaacaatcaaaagccaaaataaaacaggttaattaaacaatgtaaatgccagaaaaatgaatggtacattaatagacgcatcaatagggcaataaggcaatagtgtcacatcaatagctcaccactttctgaagaaaatagacgcccccttgttcgaacggttgcctctggatgaatgaccaccctacaaagcaataaggcaatatcagaacagcatcactgtggataagaaattgtaactattttccattccatccgattattaattaatgatttgtcattattgcacccccgaaactccatgtgaaaatatcatcaacagaatttgatcgagtacaaataaaactatagaagaatacagaaaatgcattagtgtctacttctttttttcttggaaaataaaaatcatttcaaacttgcatctcgggacattcaattcccttaataacaccaataaatttaaatacttggttttttctaagaagatgaccacatgataggaatgtttatgtgcataagctagcattagcaacatacaagaaaaagagtaaaatttgcagctaaataatactgaaaaaggcaaggaaatattagtacaaccaaatttgtcatgactaaaattaaggattcgaatcatttgattggctaaggatttgaaaacaatttcatattctcattttcttactatattttttattaccaatccattttttcctcctgaagtcagtaaacatttctgcattactttatttttgttctaacttctaactatatttaaacaataagattgttgttgaagcttccaaacctaattctaacatttgaaagccttgttggagagcttgatcttaagtttccagactccagctaattttaagcttttgtataactaaaacatgttttcaattgtatttgttattttcaaggaaaagattaaagacaccaaaattctaaaccaagagcacccttacaatctatcctatttctgagccgaacttttttacataaattaaagagaatcctaaagcaatgcttaggactattaaatggtgccacgaacctcataggctttgaattaatccagcttcctgcaacaacaacaaaatttatgatttaaattgcaaaattgcataaatcattcaagtaattaagtcaacagcatctaaaatatttaaaataaaatgtacccaaaattaccaagtgttatatgactgaagttttggacaaatccacatccgcctgaaggaaatgcaatctgttaaacacaataaaacaatagttgtaagaaacttcaaaggatacaaataacatataaattccaaaatctaaccctctataacaaagaccataagtaacagtgggaaaaaaataatgaggtcatcacctgtatgtaggatacagtatcacagaacgataagtgaaaaaatcatgtgtgctaattattacttacaagaaatattttttagagaagagagtgcaaaaaaaataaaaatagataataagattgtcccaagaaatttacattgtgtagtctgtacacaaagcaggcagtctatatatccattagcaattgccatactttgctgatataattgagtaaaaaaaaaaaagtaaacttactctatcacattgaatttgaacaaccatatgttaatcagaccacattttgaacaagattcaaacaacacacaagagaaaaaaggtcataaacagaaatgacgatgaccaattacttttcaaactgttgaaaaatccagaagccatagatgtaggaaatagtttcaacgtcaaaaaagaaaaagttagaaaatgaaatgcaccagattaggaacttgccaccaaggacaaaccagatgagcatcagagtcttttcaggttatgaaagaaattttatcaaaaacaattacaacaattaagcaagattaggaatttgccaccaaggactcgacccaatattttcacattctatttgtccaggtagtacatttaacacatatcccaaagggttaatatgttttagtttctataaatataattcgctcttacacactcaaaataaaatagtctcattttggcggtcccttgtttatggaaataggaaccacatgtgacatttccacaaatgagcgacaaaacgaacaattttattttgaaggactaaaagtgagcactaccttatttgcatatactaacaacatcaccctatctcctaaacataatatttgagtaaccatcagtgttaacagttgagaaccgataaccatcagtttcttataagttataagaagaaaaaacatatcaacagagtatatgcagaaaataaagacaaacacctctttttccgcaatggaagaagctctagcagaaactgatgggccagaccgaatcttctgaactgactgaccaagcaactgaaacaaatgcagaacaggcatcaaacatgacttaaacttaaacttcaatctgtggattaacacaaacacattcaaattgaaaattcatcatgattcataagcgtttagaaaagaccgagctctcacccaaggaaacgggctgccagaagcaacccttcgccttacgacaccaaacatgattacgcagtcagaaatctcttcttcgtccttcggacttcaaacctaatttgacaaataacaaattcaaccaacaaaaccataaaaaaaaaaaatcagactgaacggaaaatgcttgcatagataacgtctcggattcattacgtttctaaacaagaatattaacaacaacaacaacaacaacaacaatacacctattgcgatgtattttcccgattcaaccgttctagacgcagatttgcgaaattgcgctgcgaaaaaaaatagaaaagctaatttctcgggaaacagagacgaacctgaacgccaaacgcagatggaagggtagggttgacgatggaacggagacaaaggagatcgccgcctacagagttctgaagaacaatagtattatattcgctctctataattgaatttcttatgtctaatttccctatcttttcgttactgtcttgaaaatactattttccaggtcaaatatcgcgtgtttcaaattttaaatattataatttttcttcctcacctttggaaaaaaataatattatattatattttcttgattaatatttacatttctctaatttaattgttaaaatgcatttttatcaatcaaatcaatttatgatattttcgaaattagtagtttccaacgtctgaatctttgtattttaattcatatctttttactgataaaataatctgttgctaattaaataaatcaaacctttcttcatttttttatttaaactttgtatttttttatatttccaatcaatcatggaatgttctagttatttgtcagagtacttatgtagataaaaaaatgagttatacaaagttaaatttcattttaatcataattttaaaaataaaactaatgcatctgacttcttggattgaaaaatccattagcggattgtttcgaatatatccaaaaccaaaaaactaataatcaataaacttatcatcaaagaatgtctttatcatttattttataattattataaatcagacacacttaattatgaaatttttaagttataatctattaaaaatatatgtattttatttgtataggtaatagtaattaatttctttaagtcattcttaattgtacagtctcagacctacacaacttccgaatatctctcatccgggtaattcattcatatatccctcccgctggaagcctgctagtagaggtgttcgaggtctggattggatcggttttgaagcaaaaaatcatctgatccaatcccttcgattttgtcatttgatcatccattcggtttgaaatttttttcaaatccgatccaatttttttcggtttggattggattggtttttgattttttaaaaagtctaaaataaaacttatgagacttatttttatcaaactaaggagtatctagcaaaaacaaacaaatttattggacaaaaacaaacaccattttctaattttcattggacaaacatgttcattggacaaaataaggagcaatgtattggatttttggtttttgggctatgatgaggaataagcccaagtaggtaaagggtaaggtaaggtttataattggatcgattttcaccaaccaaaccgaaaaccgatccaatccagtgaaaattttcgatttttttcggttttcgatttttcgattttcggttatttcggttatcgatttttcggttcggtcaccgcggtttgcatcggtttggatcggttgatgaacacccctacttgctaggagtcgctccttgtttgtgacacatctcttgtgcatcgatgatcattcctcacccttgttagcatctaggatgtcacagtttgaacatctaacttctcaatagagagcaaacgattggagaaaatggaagaagctagaagctattcatcttatgagatcatttgataaatttttggaggaataaaggctccaactcactttagaaaaaattgaagttatatatctataacattgcttaaggagtagaacacaaaaatatagatgaaatgaattatgggtgagagctatgctagaagaatttgatcgaaaattaagtctagatattcgtttcatcacctgaaaatcaatttgttgccaggcaaaaccagtttctcatctatccatgatcgttccctgtaatagttttggcactatgtagagtcacaaagtaaccttggatatccatagtggcctcaccgttgtctccatccctattgttcttaggatttggtaggtatcatttgtgccaataaatagtaattgttgttcaacttttttttgttgttgaccatagtgttggtacgaattagttctcatcgaaaacaaagactaacttttatcgggaaccatgagcgcacacaagatgaatattctcctcccaacaatatttattctatacctaaggaccaaccaagattcaaacctagatcacttggttaataacgcaaaccattatcacttatgtcaactgatattcgacttgaaacttcttttgcccgacctttttatttagtatatcattgtaaggtagtcttttagcaccaataagttatatatattagactctgattttttgtctttctttgatatatggtggacttaataataataaaatggtgttttttagtcattactaatttactatgttaaagatacttattttaaataggtgtgttcagtgatagttaaaaatggccaaaaaaatgttagtgaaatttggaacggaagcaaaattgaaatatttaaaaagttgagagtaaaatgcaccaaaatattattagaggcaaaatttgccaaaatataaaagttgagaataaaaattacaattaaaccttaaagttaatcacaattaattttgataagattaatgtaaggctcatttgttttaaattaagaagtgcttttaaaaaatgtgattttttaaaagggaacgacttgcatattaaaaaaatagtttaaacaaacacaccaaaaatcacaaaactacttattttattttaaaattaccaaaaatcaaagaagtcttttgatattcaaaaatatacaaattttgatatattaatttttagaatgaatttcatatgattttttagtagatatataaatactgcattcatcaaacaatctcattcaactcttgaaaaaattgtagactttatttcttatttttcttatcagttgctagacttttctttctttcttcacacttcattctctctcttcgttgaagacaatatatatacatttgtaactttgttcacaaagaatgttattgttctaatgagtttccaattgaaccaatagaaaaatcttcatgttcaacattaacaaataatgacgatcataattttgaacctattgttcaaaccaaagagcaagtaggaaaatatgttaatacataaaggactagtataagaagacatgaaactagaatcaatgaattttaaaaaagaaaaatgattaccatgaagaaaacaatttttaaagaatttatccacaaagagaaggcataaattaagattaaatcacaatttagcatatgaaagtgcctcaaagttggataacattgtcagagtaatatattattatttcaaataattactttacaatgtatttatctaatttaaatttaatttatttgaaaaaagtatggattttacatttcttcaaaatttatcatttcttagtattttttttattgatttttctaattttaaatattttctaaaaactcatgtaatccttttaaattttataaatatataaagtcatttttttagataaaaaattattttaaattcttattatataaataaaaattcaaactacaatttttttattacaagtcttttaaaaaatctattaaatgatgacattcctacctaatcttttaaattttacaagatttttatattagaataatctttgaaaatcttaatccaatacacctaaagagtaaaaaagaggcacttagtatctctatattttttagataataaaataaaatataaaagatggagattaaataaaaatgcaccgtcatcgaattttatatgtaattaatgggttagttctttcatatgcatttaaaatataataatgatagtgtataatgttatttaaagaatatactagtctaaaaaatacgaagacaaatagacatcatcattataatatctataataattataatctttcaaaaatcttaactgaattatattttccaaaaacctttttctacaaatttagttacccaaaaaaaattgtaactaaattaatccccaaatatttaattagtcgttagtcattaaattagtcccttccaaattatattatcaccacttcaatcatccataaaaacaaaaatgttaatattttaaaatttcttttaaagatttaatctgttactaaattaaactttagatttcctttttcacttctttaatcctctataatgaccatggtgatattttagatatttggatcactaatttgatgacatttttttatgaaacactaataatttaagattaattgtgtttgcttcatcaaaatttcaagcttgctgcagaagcaccactatctacgagaagtatggtaaggccagactcgatatgccaataatattgttaatatttggaacaagttttatttataataaaaaataaagtaattatagaatttcattagaatatagtcaagaaagaaatttttgcgctcgatgagaattgagcttcaagacatctcgtaggactaatccatcccacgaagctcaccaacaacacgtgcctttggggggtccaggccccctactactggtcggcaaacggacaacgagctcacgcgtcatttctagcccggattctgacttagagatgttctgtcataatccaatgcacgataacttcgcaccactagcttttcaaccaaacgcgatgaccaattatgcaaatcaacagtgagccaaggagcgatagcctcttttgaccgaaaatagtagaaagaaagaaatactcattgactttggggggacatgtttgttcgtgagataagtgctttgggtatagtctcttggaccctgaacctacgtgcctatgacttcatttctcaagaaatatgcgatgacttaacaaccaacaaatctacctatatacaaaaatcgtaataataagtagtatatgaattgatttgggagaggagaattgagccaaaaaaaaaaaggggtaaaaaactgtaaaatacattctgttgagtaaacatcctagttgatttcatgttagcttgactgctccagtccaggtaaagaagttggctgaaggtttgatttggggggaacacctgcagacgctttagggatcttcgcttttcttctccttgcagagaagctgccatcttctcagggcgaaaatgagttccttccaaaccctgttccggctttctctttaccttctttattaaaacaccgtctgcacccttgacgtgatccaaagaaccacttgaacttcccttagctttttcttgtttaggaccattcaccgaaggattgtgaacccgtgcagcggtgactgcattagaaactgtattgtttactgaagcatgagtatgacaactagagtctgcagctaatcttgctcgcatgggctgttgggaagtaattggactaggatcaaattgaacattctcctttggtcgaggtgccaataagtttttcctcttcattttctcctgatcctaacaataagtaaccagtgagatagaaaacaaaaatcattattctcataagacttaaatatgtttttcatacctgtaatatacttctttttcagtttactacctaaatatttttattattattttactacctgatagtttcaaaattttacttttggtacctacctttaatctaagtccattaggtgataacgtgacactttgttagcctatcatatcaccacttaatcaatgatgtgatactctgttaatttgccatatcatcactcaagggaccgagactaacgacaggtaccaaaagcaaaagtttgaaaatgtcagatagtaaaataaataaaaatatatatttaggtagtaaattgaaatagggatatataaaatcaaaaacatatttaagccttctcacaaatataaaatcctgattgtcatctgtacatacaaaaaacagaaagcaaattctccaattcttctgattcataattcatagttatctatttaaagccataattaaggtaaggatgaagagaaaaattaaaagactcctgtttagtttccaacttagtcatgccacataggtatttgcaggctagaccacaaattactatcgtgaaactcctcttaaattttcaaaactgagaacatgtaaactgtaaaggcttctttgttttaatagagattttagaatattactacaccatcgttatatgctattatttattgcaaaggcataccttatgtctgctgtacagtgctctgcgcctctcttttgacctgcaaattgcacgcttgatcccatggttgtccatgtaaccatttggccataattccgcaagctgaagaggacaatgcacttgaaagtgagaaaaaatatgtttagaaaaagcaaacatattaatttagacaccagaaactgcaatgtatatgcaatacacatagtcacacgcaaaaagtaacacaagcttctgaaataagagaatcattcatgaggactcaaaagaaggaaaaaattgcaataaaaaaatttacatgtgtgaaaaaataattgagaatccttttcttttcaatgtattcaacaaaatagttatcaatcctagatagcaatgcttagcagccaaatctcaagttatagctggatagtgaatagcatgattgctattttaaagattattatacagatatatgatccatcattatgtacataattacatatgctaaacaaatatttaattaatatttcttggcttattcccaactatcaataaaaaatcataggtcttcagaaaaacatacaattaaataaaagcaaaaatgaaggaagaaaaatatctattaagtcagagaatagagatgagaacagagatgggtgttgctgtaaaaatcgccatagatgggaggctccacaggtttggttgtgcagcagaacaaagacagtagagagaagaaaggggttatcaaccacagaaaagaagaggaaacgtaggaaaattgagggttagggttatatacgttttctgaaaatggagggaagtcaattttacacttaaagaaccctcaaaaatgctttttactttaaaggcagaaaaggattttcaccggcttctcagcaaaagaggctacaacagcagtgaagcaaaaacaccccacctatggcagttttgtcacatccgaatgacattctgctctgcacctctgcaattgcaccgcaattgagcactattgataactatggtattgaaaagaaatgatagaagagactttagatagtactaatttagtaattttaacttaaactaggagatatagaaaagaaaataaaatcaaacccaaaggaagaaggtactgaaagtctgaaatttaaaaacaaatatcgagaggaaggcatagaaaatttgaaccacctcagcatacaactttctgatttgcggaccagcattttcatctaacccctggaacaattgcaaataagattcattaagaacaaacttcaaaccgcacaggatctataaaataaatacttaaggttcaaacttctgtacatcaacaaaaaggtcatagagatcacaaatcttgtcttccaatgcagtgtccacactaaaattccttttagttattggtttcccatcaggacgtaattcttgttccccagatgctccagcttgctgctgtagctgaaatgcaggaaaacatgaaaaagcatcccatattaaataaccaaaatcttcattaatcaatcgaaattacagttatttcctgtaaaattacaatcaagatacaacgcaagcatcaggaaatatatcaacaaaactagattgagtttcgtaactacaactaaggaaatccctttccaggtaaaagttatccataagtaaacatgccaaaataaggatttgcatataaaactcaaaattgcattgaatcgatataaagaagcatcgataagaaagagtgaaaataagtatactatgaattataactatagtagggggaatcaaaaagaagctacatgaaccagctaaaacaagcaaaaagtactgaatatttcattttgatatggaatgaaatagaaaatgtaactataataaaccttggattccatagttggggcctgcatcttaatcatctcaataaattctttctttatctgttgaaacctaacatctttctcctgcttcgcagacaaacccatactgatcatattttttaagttactctgtagcaggaagacattgaatgagaagataagtttcaattcaagcataaatggtaattaaaattacctatgtaacgataaatataaatataaattataaacaaagagaaaaatagttgcaaaaattcattgacagcataaacaataaataataggtgggaaattacctttttttgaattggattgtaaaagaacggagttcatggttgagtttgtttgatttttatactgaagaataacttctgaaatataattagagtccacttgacataaaattaattttgtagtgataggaatagagttgtttttgtttgggaaatcaccagcttctactgttagtgttagaagaaaaacatttattatgtaaagagtctatccattaccacaaattagggatttagattgatttttcgtatccatgattgattctttctaccctaatccatgattataaacaaagagcgtgggtatagaacatacgcaagttctactcaccaaggcaacaaagctttacttttcctaaatctatttctatataaaaatgtgaacttgagaaacttgatcaattacaattagtgcatgtttggttcaatttatttgaaggatcattacttatttttgcctgcttcatgagagagtttttaggaaataagctagtatttctcccaaaataatctatactgatcttgcacttagaatcaattcaggaaggccatctgtcactgtggagtcaccaaagtctaaagcaaacaggtccttcattcctgaaggaaaaccagtttttattaaaatggaagtgggcaaacaatcacttaaaaataagaatttcatagactcagacatggcttaggctagggtgggcaaccctcataggtctcccacggtgggagatgattttttcaccgttggatttattatcttttaaatcaaaggtctacatttttctttttcttttttataattgataattatctttcctggtttgcccttgacaccctcgccattttccactgcaaaatctccatttgcagtagcctcacttttcccatcagttcccccttcatccaacccaagatcccctctgccctgttatcgctctcctctccatgaccatctctccctaggctcccaccaccaccgcaatgcgaagcctccaatgctgttgcgctgtcctcgtctggtttcgcaacaactgcctcattactaccaacaacaagccctaccttcctccccgtctactgcttcaaccacgctaactacgctgagtctgcctccaacgctgccacacagccctggttgagtccgtctctgacctgcgccagagactctaggcacacagcttcaatctggtagtgtgcgtggggaagcctgagtcagtgctggtggacttggcgaaggccattgacactggttttctttattgtttatggtgggttgtgatttgttttggttttaggtaattgttttcggtcgtggtttgtaacggtagtttatggtggttgcagtagacattctgccatcctagggcggtttatggtagagatgtcgacagtggcttgtgtcatcgcagcagcggtgaagcaacaagatggagtgagagagaagggggcagggacagattgggaaaaaagaagaaaaaattgaatgctttattttagaagtaataaatctaatggtgaaaaaatcatctaccaccgtgggagacctatgaggattgtccaccctagcttgagccctcagacatatgacattgaaatcaccataaaaagggtaaaggaaaaaaaaaaggaagaaaagagaatcaatctttaagaaggtcacaaaagtaagtcactcagtcaaaccacaatgtgattaggtcacgaatgtattcaaagcctagaatatggtattgttaaatcataacctaatcactaaacaaactacaaattgtacaaaagttcaggatagtggactggacagaaagataggtgatttgagagatgcaataattagtttcaatttttaaattttgtataacttttgggttcaacaacaaaaaggcagcctagtgctatatagctcctgctaagcattggggattataaccggaaactgaaaaatacatactaaaggattatctgttatgtttatcaagcttaaatacctttagtgttctgagctgaatcagatgcccaagaatactcataagacggttaagtaactcctttgatactttcccttggcttgcctgctgcgacaaaaacatatagtcaatattacaatatgataatacaatgttcaaactgagaagaattttgagaaaaaaataatacaaaattgtgcatatatctagaagcatttagcataacaagaaaacaaaatttgccaataccgctaatctagcaactttagcaagtttcagctttatttctctaggcaatctccgtttgacaccctgaggtgtggaatcagcctcctggttttccatagttggtggccttgctgtaataatatttaaaataaaaacttagcattagcaacaaacttcccacattgcctataatgtgagcttcaaaacattttccaaacttacattctgcaactatcttctccaactctcgaatagctttctcaagtgttgtcgttttaggcctagcaatagaaccatctttcttgagcacattttcagatttctgcataagcttcaaacaagatcttgatcaacacagtatatgttaaacacataacagtccactttcacaacttttgttgtcagaagtcatagtaataagaacatgttatctcaccaagtgcacgctaaatggatagtatagtttgccaaaatcttaaagaaaaaccaaccatgtataccaatatcccttaaatagaaattattttgaatgaaaaaggatgacccgcaacagccaaggtaacaagtaaatggagtaaattgaagcaatatgctacactgttaagatccgatcacaaggtatgagacttaatcccacaataatagtccatagtggatggagtcacgggatcactcccaaaaacaatagtgggatgactgctatttttaatatatgtatatataaaatattttttattctttctattatattataatatttaattattacatttttatttacatatattttatttatatatatttatattattattattataataatctataatatatacactacctctgcccctaaatgagacatttttcaagttgtcttttacattttttataccacaatacccttaattgctttacaataaatgcaataaattaataagataaatttattctttctcttacaaggattggagaagactaggacacattaattaattaggtaaaaagtaattaagtggaaagagagatgatgagttaacataattttaagggtaattttgaaaaaataatacaaattgctaaacaaatttaatgttgctaaccaaattaacaaattttcttcaaagatgtgaattagttaaaaaagtcttatatttagggatgaaggtagtaatatataatatgcattatacatttgtctctattatatgatatattatgcattaatttttctatagtttttaaatattatagaatactttatcaaggtgagccctagcacaatggtaaagttgtgcattggtgaccagttggtcatggattcgaattcgaaaacaacctctttccatatacaagaataagattgcgtataatgaccctctcccctaccttcacatagcaaggagcctttgggcactggggtatgttagttttttagtttttattatagaataatttatagtataatatatgattaattataaaaataaaaataaaaggcaaaagaaaacctccacaattgtaggactgcttgggttggagagtagcccggtttagggtgcaaatacaacacccactcccacccaaaaacaaagtaagaaaccttggtgtactttagtttttattatagaataatttatagtaaaaataaaaataatgggcaaaagaaaacctcctcaattgtaagactgcttgggttggagagtagcccaatttagggtgcagatacaacacccactcccacccaaaaacaaagtaagaaatcttggctctcccactacaatagttagctttggtggtgtatttctcttaggattcttatcaattcgcattaaagcttttcaacgtgtctcttaattgcaaacgagcgatgtggatggtgatgacaacattgcagtatttgcttgggactagtcaaagaactagtgcatagccaacctgaatgggcatcggggttgccaagcatggtgagatgataggatccaattgcaaggtatgagacttgagtctcatgttggaagtatgggattctggttttgtgtttataagactttgagctctctaactacaacggctagtttttgtaatatgattttcccaaggttcttatcacacacttttcctggcacactgcatgtcatgcttcaatgtaacctgttaatcacaatggaagttgatctactagaagtgcttatttggtgggcagttccatgcttcatatggtagctatggtttagaatggagaatcctttactttaaagctgaatagcaagaatgaattgatataagtgcagcagcgagccttcttcaacatcaacagcacctttaacccaagttaattggggtcggtggtagatgaacccaatgatagatacgaggaagttaaaaaaaaaaaaaaggaagggggaggagaagataaaggggaaataagacaaaagaaaagaaaaataagataaaataaaagaagggtgaaagaaggaggggggaaacaaagagggtaagtactaaaaagggaccgtatagaacatagaaataaaataaagacaacagaaaagcagctacgtaaacttactggtgtttgtatagcagattttcccacggacaagttaagatctggcagttcattgatgccatttttatctttcgaccgaccagtcttttctagattgtcaacactatttgaggtttttccaggatgggatttggaatgtgcagatccacttttttcatggtacttctgatgagaagtatcaagcaagccacttccatctttatatttatcacatgtgttcttagattgaagtactttggtcttctgtttttcagcaccttctgcagcagcaggagcatcatcatttgatactttcgaacaaacaggaggatctgatgttggtctagtgtcagcagttttcctgttcaaactaattccagacacatctaactcactccgaaatttcatgtcttcataatgttcaccgggtacacccaaattatgggaggaactaattgtatttttcacaggtaatggtgcagtctttccagcagcagtcttgccaacttttacatgtttatttgatacatgactatcaatattttctccaggattcttcggtatatcttttcggcgtcttttctttgcttgctggataggcaatactggaggttcatttctggtaatatagaaagaagaaacagaaaatcaataaaatcaggaatttgtgtgaaaaaattatctactccaaactacaatttaatagattcaaaatgttggcacaacatgtgtaaacaggtgtcacatgaaagaatattcaatcataaaccaagaaaaaatgttatcaggaacaggaagaaagaacttcacaacatcaaatactaataaaggccttaagctataactgatgaaaagtttaagtcaaacaaagtgataggtacagaaaagtaaattcatagtttagaacaatagtgcaatagaccaacaatcagaaatgaaacaagaccaacatttcaagcataaaattaacaagttacaggaacactaatattagtctttgtcactactcaaactatgacagtgaatgatacatgatctcattacatgttcatataacaacacaagcatatatattccactgaaaatgtagtattatatccatcaactgaaaaagaggaaagtgcaaaggcttccaaaattaagtggtttacaaagaaaagagatagacataaagagcacaacctagtgcatgaggctcccacctaggggtgggcatataaactggttcgaaccaaactgtttccgaactgcactggttttttaaccaaaccagtttggttaaataaaactcaattgttttttttttcaaataagtttggttcgaaccaagctggttttaaagccagtttacaattggttcaaaaccaattcagtcctggaactagtttttgaaactagttcggttctgaaccagttttttaaaaccaatttggttctgaactcgttttaaaaatcacttctcaaatttggtttcaaaattgaaaccatttaaaccaatttggtttcaaattcggaatcggtttggtttggtttttttccctgaccagtttttgaacacccctactcccaccaaatgagatttgaggaaggaagatgcacacagacttggccccacaagtgaagaggctatttccaggattcaaactggtgacctccaggccaaaaggcagcagccttagtgttgaacaaaggctagccctcacaaagataagaaattgccatactccgaaaatattcaaacaaaaaacacttacatgcgttccaatttccccctatttacaaagaatccatcatgtttgattgcagaattatcaacctcaaaatactcattctgcagaaagaacagtagaactacataaaaaatatgcaaggtgaaacggcaacaatataggacaatacaattcctgtcatcattaatcaaaggtcaaatggtcataatgtcatgagtcatgacaaattaatatggtataaaaagataccaaccaattcagcatcatcaatgaaagagtcttctgtatcatactgatcatcaggaacatcaggtgcatcctcctcatcactgctgtccttaccctaaaaatgattcagagtcccattattcccaacatggaaaatagctcgaaaaatttaataaaatacttacatatgcatctatgatatgaatttatagtagaaaccaattcatttttgtacagaccattgagtaacaatctcaggaagcaacacacccataccatgtaaaggcgttcaatcttctctattacagcactgaaacggtttgtctgaggtgcatcctgttcttcaatctccttaggttgtccctaaaagtgacaagtgttattaaaatagtgaaaacaaaatcacatagtcacatactatttcgaaagacaatatgctaattcctgctggtatccagatgacaaataattatactgtagcataaaaccagatatagtcaattcaaggctcgattatgccatgccaaaaccagtgttgttttagcgctgacacaattatgccatgccaaaaccagtgttgttaactagcagccaaggcagaatggcaaggtagattttttaccaaccaccataggcaatttgtgaagaaaggcccgccataaggcacaatggtatgtttatggcggaatttcagacttctgccatctgccattgataacactggccaaaacacaaatacaaacagacagacattatatcaataggcataacgcattcaacctaataaatatgaagtcaaatacaagtacttccgcgagcatttcgactttggcacgacaaaaccctattaaatgattatccataagagcagcgccacgcagcacaaaccattgttgaaaaccaacaagaaacatcgtggcataacacgaatccaaattaagtcaataagcataacgcattcaacctaaataaacctaataaatttcaagtcaaatacaagtaattccacaaacaattcaactttgccacgacaaaaccttttcaaataatttcacgtaagatcactgccacggagcacaaaccgttgtcaaaaaccgacaagaaacacccgggcacttcccagttaacaacatgccaggtcaatcattaacattttagcagaacgtaattctaaaaaataacactatcctcattcctaacccttatttcagtccggaaaaaaaaaaaagaaaacacagtcacggctcagtcaaaaaccacctttgcaaattacaattcaaaatatcatccatacaccacagtaaccctctcacacattgcaacctacttaccgaatcacaatgtacgtaaacagaaatttcagaaacacactattactcgaaacaacaatttggaacctaaaaagaggctcaccggagcgattctggacacgagcgcagggttcgcattgggagcgcgatgctccggtgcggaagcggatccattgttgaccttgctggcgtccttcatgagcttcttccacgacactatggtggtctctcccgggcggagctccaccgtgaacattttccggtcgcctttcttcacgaacgaagacggagccctcgccgctgccgacgaggaatcgccgctgccgccgagaggagccacctcctctgcggccatcgattggcgagtttctcgggcgtcggtgcgaggtttcggggaaaaactgttagggcgcgagaaacttggcggaaagcgaaacgaataataataagccctagaaactgaaaaggaagaacagagaacgagaacgaaaagatgaaggagtgaagaggtgaattggaattgcgcggattcaaaaatgagagaaaggaagaaaagagagattttaagtttgagtgcaatttggactcggtcgtaaaaaactgtgttatatggtaattatttagcataagtggattgttgattgtacaattcataatacaagtttgaaaataatttacgtagcaccagttgtttttgttgttgttacgtagggtgtggaagtattctgagtagtagtactttatacttgttttttttatcttgtagcaagaggagatacagcgagtgacacctcctgtttggttgtcatactttttcatgattatatctataattgatgtaatcagttatatttaaaactaatgcaaaaaatatatataatcaatgtaaaaaatcagttataaatataacttgtgtaaaagaatgtgacgtcctatgtgacaaaacaacatgctatgtaaatattttcaaaactacaccaaactaggatgacaattactatgatttagataggttcccataaaactatacacataatcttatttagatataatatctatatccggtctcatattgctccaggtaacaattttaatcatcatttttatacctgcatgatacttatatactcatatttacatttgtgatatacactttacttatatataatatataaggttaataataataaaatcaataaaaatttaattaaaatatttactataattatattaaaattcattattaaataattcaaacataaatatgcacataatattaaaaaaaaaaaacataatattggtttattcaaacttaagtcataaataaataaaaatacaaaaataatcatccatcttagataatcatccagcttaatgatttaggattttttggctacgtgccactataacagtataactatacgcttattcgttcattttttaataggctcgaaataatgataaactagatcttatataaacctgtctagaacatatgaacaaaaatgggaccctacataaaggatgacatgtttactaaaatatccatccactcactcccaaacataagcatatcccaatatcccaagcacaacacagtgacacacatgaacaatatgaggtgcctccacctccaaccttcactgcttccttttcctttgcatgcaaaactcaaaccgcagttacatcatatgagccacactaccaaactattttggcttactactcaccaacctccacgtggccagcacttaccttcagcaagtccactaagtaccaaggcacttccacatttactggttgttgccccagcccaatccggtgacttgtccaccttgcttccaataaggttcaatctctttctttccctttttcattgcttggagaaaagttacttactaatattaccatgtctaaaaaaattattcaataaatttgggagttagaaaagagggtatactaaaaaaaaatgtattgcgagcattcctcctatttatttgatagttcatgattattataattgaatttgacactaggcttaggcttataacaaccttttactccaaaatggagttagtgtgatcttttaagtctagaagttaactaaagatttctttatatattgcagtgctgtgcttctatcggcatacttcatagcaaattttgtcgtgccaggtttccttaccaactctttcggatatgataagccatcaaacgaagagcagaaggttgacgatgtaaatgcaatagaagatgaatagatagtcaagggaggtcacgaaggaagaaacaggattacgtaaatgtgagaactgagctcatgatggttgaagcactactgtacgtgtcttttgtatctttagttcgcatttagattataataaaaacatccaagtgagatttcttttgctcattaatattaggtattctagacttggtagcgattacaatctcatgaaaccaaattgttcctgcccttgatttactggggttactactacccccaaaaaaatgttagtaaacctcttaagagtacagtctttatttaacataggattaatatgattattgtttgatatttaagaatacaagttatttgtactaaagaaatttgccatcaatgattatgtttatgttaatgttagtatagaaatacttgcaagtgcatcatgatcataccattaacgtaaagagttgtatgattcatgaaacatttgttatgacaatattccccccccccccccccccccctattatctctcttcccttcctaactttttccaacaatattcatgtccaaatacaatttctcaaacataaattcactgtgttatacttttatattaatagatcaaattctgttagatagagactaaactacccaaaagcaagcattactataattttttttataattacaagcattactattatatatctattaggatatattttttaatgtctttttttttaattattataattattattttttaccgagaacttaatgtcaaccatgaccgaattcctacagagttgcaagcttgaggagtatctcaaaggatctccaacacccgagcagatagcaagtattggcacagagtgaacacataaaatgtttactaaaggcccgaaagctatattttcaattccctcaaataaaaaagaatgaagtattaattaaaatttctacagaatacaaccactaagtatttggcaaaagaatagagaaaatttacagttatctgcagggggaggaggaacccaaaaacattgcttatcctcaataaacacagtggaagatgaaatttgtctaaacaactgcccaaccagcatcgatagaagatttctcagaaggagatggggatccagacttgggaggcttctttccaaacaaagatgacttgctgtcaaagaaactagagaatgattgccgacctgacttttcttcgtcgtttgtctgatcttttgagacagacttcctcaatagtttatctttgcctccaaagataaggctaagcctcctaaatgggctccttggttcaccagtaaccgtagttgcttcctctgtctgcttaatcatttttagagcttcttcgggattcaataacattttctccactgtttcatatacctacacaggaatacgaacattaaattctctattgaatgatgttattaacaattagttgcagatataaatcaacaaccaagagttttattatcaatttacatttccaggggaatgatttttcatccccatgcttaagaagtagggttatcttgcacaacgagcttgtatgttttttttattttttaaaaaaagaaaacagcaaactgaatagttctggaaggtaggctaggtaaaagttacaaatttcacgcattgtgatagtcttggagtgttcctttttcttcaggactctgctttgtgagtttatttatacagtgaatgactgttcaaatacgaggataaagcaataaatttctccactggattacatgtcatattgaccatgtatttcatggtattaatcaatagagaggcttcacaaggattcagggagatgctatataacttcataagtcacttagtctaggagtacccacctggacgagaccatcaactttctcattcaatttgttgttttgacaagcattagttatgtactccttgcagtcatagaataacttcgagaagtcactgttactagacagcataggttcggcaattgcaaatcctaaaccaagctatataattaaaaccaaaggttatgattagaaaggtatagaaatggtataagcatcaatacatatcaatcaaatcgagtcaacttatacgaagatgaaggaacaggttgagtttttatcaagaaactttacaaaattacaggattatataataggatcatttatcaattaagcaacattttggaacaaaatactttatgtaatttaaaaattctgaaataatataaagttaagaataattatatttcttttcaataaaaattggtaagagcaaatgctttaatcttcacaaaaattaacagcaatgccactgaagtctgtatggaaaggagttttactaaatgcttgttttacattttttattaggaaaaaaggacaaagatgtttaaaaaagtatttagttgacagtacacatcctccagtgaaggctatcaattttcttgaatgacacaggatattactattagtcctatgtaacaggaagaacatcccccatccttacaacaacaaaagccttatccccccttcttcaacagaaaaatattaaaagtaatacatttcatctcctttatacaggcagatgataagtatgtttgcacagtttccatttttttacttccctttctcaagaccaaaatttttgatctaggacacccataaccagacattacattgaagatttgaatactccagtttgagccaggttaaaacacaaaagttgaagaatttatactaacaaatgctttattggtggttggagccagctcaaaacacacaaattgaattacttttagactaacaaatgctttacaagtgttataaatattttttaaataattaacattgatacagattatggataatgaagggcatttttatcagttaagggcagatattttggataaattatgcacttaatgctattggaaatttcataaaaagcatattatgcagttttaaactcttcctggtctactatcaatgctcatttcatttttaactgtatactgattatggattaatgggaatgcccttaacagataaaaatgcccttcatgatccataatccataaggttattgtctacaaatgcccttctctaccatacacacacataacatgttgctgcctacagtcctgaaatccagcatgtgaaactgcaagtgtgcatgtgttaaagaataaccctatgctacctagagtcctttgaaatccagcatacgtaacatgttgctgcattgtatattagagctctagggagattttgggaatggacatgtggaggcgaccaattgccttatatgttcgtataaaattctttcaaccaccagcatagataacaagttgccttatactagagctctaggcaggttttgttaagggatgtgtggacatgcccaaccggcatgccaatctaataattctaaactcgcaaaaaatgcctagagcctagatgtcaatacatttttctcctatgatatgcattacaggaaaatagtttagttcttgattggtaccttcatcttcatgattcaagtctattactatatattctacaatctgctttagattcagccaccaaactccaaaaaataagaaaatacaattttcaaataaaaaattaattaatatacatcacttatgagttataatattaatgcttcagagatccattatgtaatgacaaatgacaactgtctatacacaacaaaattaatcaatgtgataaaagataaaataaagaacttactaaagaaacaaacagctgtccaaaaagatcatatggatggatgtcttcaaatgcattgaggatgccctccctataaatgaatgcaacaagggattcaagggatggctttagggttgaaatatataaattaatgcaaaaaatcttcatcaccaacttacactgccaaatcctcatcaaactgaggtgcctgcttaacagcaggtactggtttggatgtttcccacaattcacgccataaattacctacaaatcagatatgtttaataatatgaaagcagaagaaagtaaatgctcgacagttcccgtatttcttgcagattttgtgtgttataacttattataacttataataaagtaagacagtactcaagatttacttatctccatatgctttaccatagatgtgatatgatatccaatttaggtaatatatcttacatagatgctacaaagattgaggaatagggtttcaacactttcaattccatggtttgcccaaggcaattaggaatatgaaatctgaatatctatgctgatatcaattgactgacaatgaaattattaattcaacattcaaaattattcaaactctacatttagacattctggacccaaaactgatcagtttgccacaaaagttcctacattagactgcaataaacaattcccatcatacatagtgtagttcagtagttccatgcatatcttcctcacaacttaccaaatcacaacctctttggaaatcaaagccataaagaacacataaatgatggtaaaatttataagcatagagcaaaagtttactacaatcgatgacaagttacagtgaataattgtttcaagcaaagtaaatccacaattttatcagatgttgatggtccatttacgtagaaaaataccacaaaatagccttgcaggagaatttaagtacatcaatctatgatggaaaagactgaaagtacaccttctttttgcattcgccgacttagctgacctctggcagacaatgcctcaccactatcaaaaacatcactatcctctgtacttgcttcattatctgtccaatcaggaggagagtgccatcttacaaaatcctccaaaatacatccaggatttgcagcctaaaatatgataacaaacaaaactaactcagacagaacattaggcacattcaacatagtaagaagcattcacaatatcagtaagaaaagttcccttcaagggagctccttaccttgaaagcctgcatatctgagagcagttgagagcacccagcaccaacactgaccatgaaaggtaactttgtaataagaaaatgcctaaatgatgataactttaagctattacataattgatgcacatctgtaattaaagaaagctagcatttacaaattatttacataagaaacagatatgatcataaatgtattacaaaatagcattctgtgaatgtttgttgatcaactagttcatcaatgcaaattctagaaattagtaaaaaaaaaaaaaaaaagaccaaagacataggtcataggttcagaatccagactcagaccctggtcgtgggagttcatagtctagatgtgagtcaataggtcataatcataggtttagatcatgcgaaacaattaaaaaaggcatacaggaacacatctaacaagcaatgaagagcccaagaagcaagatgaccttgattattttaataaagaagttcattatatgaaagagtcaattgggattcacacgctatatatagggaaaacagaaagtccatttagatttaagataacagattgcatcatggatgaatctcagttagcatacagacctccctgtccgcagcacaaactcctctgtttccctgattagatcttctgtaagcaaaggtccttcctacatgaaatggtcccaaagttctcaagtataagagtaattttaaatagtgattatatagaaaaaaaatatatttatcaaacctgagtgattggagaatacacaggctcgccagtttccaacaatgtcatatctccagcaggatgatctgcaccaattcgaagaacaagctccccactattcaatctagcatatagaacagggcttgcaggagctctggcactacaatcagtcgattcttttatgtctgaattagcttgcatcatcatagagtctaaagattcagtggcaataatacggaaccttttccgagagatgcagcaattaattacttgaaattgttgatatagaagacatgacttcagatcaggaatctcattctgggggactcctggtaagtattgttcctcaaaccaaagtttccttagctgtatcagtaaaataactaatcaagtttaaaatattcttcttcagctggtaattaaggaaaagtaggattagtgattctagttaagttcaagttacagatcctaaaccagaagaagtttgtatatgatttttttttttcttttatagacaaacagatttgaggaggaaaagaaaggcaaacaactttacagtgcacgagggattctgttgttttggtttgaaagccttcaaagtttccaataacacagcatatgaataatttgcttccttttccacaaattttattttgcaaaggggaagggaaggataaaattggatgcaaactttaatagaccagaatttaaaaaaagaaaagaaaaaagaagcagcataaaacaaggaaaaaaaattcactacccaactgctcaaacaaaatgaggttctcaaacctttaaaataactattaaaaatcaaaacaagtaggaaacaaaatttgacatttatcaacatggcatcatcaagttatcttgcatatttatttggccaaatcacgtgatctaagatgaagatgtcaatgatgatgatgcactctattactaagatcataatcacttaaactgacagttacttcagataatagtttatatataatggaaaaattgatcaataatgtaaattaaatctagagttctgggtaagtaataagatgtatgattatgatatcagaactataagttcttttgaagttaaacatacttcagcaacaaccccacaccagaaaagagccatttttcgaagagtcttgtagtttccaaggatttcagctagcttaacaacaaggctttcgggaggcgcaccatgaatatctcttggcaaagatgtcatagcactttcctctagattcgagtcgatctttcttctaaggaaatctccttctgcgaatatcttgcaaatattacaacgaaagtgaaagatcataacagataatgggttaaggaaaatgaggacaagcattaaaacgttctttaacataattacattatcagcaagccacctacaattcacatacctggatcaaacagagaattaattaattgcacaactttcttattgctagtaaactcagatgtaagtttgtcctccttttcacgtagcactaaagccttaactgccaagagacttaagcctgccctctctctagcaggtgaagatcctcctgatgaagctataaaatctttcattgactttgctttacttccagccctagtcaagaggtaaaaaaaatttaaggaagaggctagatatattgttgagcagcaatctttctgaatgatagaacaagactcttatgttgttgaactataaaaacttgcatttgacaaatatgtgctgtgccaaatagagaaggggaactttgcaaccagagaaatagaatgcaacatcattgagtagaacctttcagtagttcacaaaaagcggcaggaaaacgggacaacagaatgcaaaaatatatgcaaaacaattacaacttactcaacagctatagccaattgctttagcacagatgatggaggaatggggtctttagttgcagcagttaggccttcaactgagggaattgcttctgaagcctgaatcaaagtttttactcatacatcattaaagcaacccatatgtgtaattgaattggcaaatcaataagatactcatttatataattgataggcaaatcaataagaaatctcaattgtatcttcaaagattttactggaaagagggacaccatgagatacctaataagcatgcattaccaatttatcacaagcataccaagcattgctaacttactagacaaaggatgatgacacaatctgacagactattttgaaaacaaaatgctcatagtcagcatacattatcagcttttgctaacatcctcctcacttaacttcctggtttagagacttcaatcatacgcacacagttggaagatgaatccttgagttaaaatgtttcagattttcttaccttggcctcgagatcattctttacattcaggaggtacaaattatcatcataaaatggaatggccatgcttgcatccccaactttatctgtatcttcaacttcttttctccctctccggatgttctttattttatcttgccaatcctgctttattcctaaatgtggaggcctccactttatatgcttcgattcactatgaagctgcaccatcccattacaaagaccaattgtgtaagtaattacaggacaaatgtcacgtaataaatacctagacataaacgcaaacaaaaacatataaacagttttcgatcatctttaagccaagactcatttcgaaattataactattcactttgcaggactcctgcaaatattttcacaattaattgtgattttttttttttttgaggaagtcattgagggaacgaatccaataagaaaccaaacaatgaatttcaacaccctgatctaaatttcccttcccttattaacgtcaaattagaaactcacgaaacaaatatacttttgtttgataatcaaatacagctcccggaagtgcatatacgttgggaataaaaacaaaaacaaaaatgcaacaaaacaaaacaaaaacaaatcgaacctcggtaggattgaaatagttaaattcaatgtgtcctcttccaaatcaataattgccattaccttggagtcgttttcgtcggtgtgaggagattcagcttctggttgttggccagtgaaggtgttgggcgacgactgcttatcgtgatcttcttcacggtcaacaaattgagtcaatgctaattccgaaaacaataataataataataattatttttattttattttataaatttattttttgtttgaatctccctaaaagagaaagggagaagaaaaaaaaacaaaaaaaatgcacatccgttcggaatataaggagaaaaaggaaaaccaaaaatagagagatagtgattgatgtggcgcgaggagaacctcgatcggatttgaaatccaagagaacgcgctccgctttggccgcggcggaatgaaaggcggttctcgctttggacacaaaagtgtgctgctcctcctccatttcctgcgcacgttaagccacaacacgcgaagatgaggtcaggattgaaacgctgagactcatgccatgccaagactagatggactggaactggaagaagaccaacacggtttcataattgatatcaactagtataagtagtagcggaacatcacaaattcactctcctctgcactcaaataacccaaaccaaaacggggatcgaagtaataatattggtccgttccgttatatactacgagtccgtggcaattgccaactgcattaaatcactctgcccggtcttttaagggtggatttagtagagaaaatgaaaaaaaataaattagtaaattagtatgaattttagacctttattactttttcttcttctttcctttctactaaacccatcctaaattcgttttctcgaaatgcatgccggtctgtcctttcctgcagtccaaacttgtgctaccatacatgataaagaaaaaacaaaacaagcattcacggttgagtagaatggattagattgtctgtatttgggcaataaaattgattttgaatttatatgtttaatgtttaaatatttttattataagatcaatttattatgagtaaaatttaatataaaattttgggtcaaatataaattttgaaaataatccatatattatcacttttaataatgtatcatatatataagggatagtctttatacaccaacccaaaatttaatacatcattcaaaaattttaaatgccaaaagtatccttgtgttaaggttcttacggattcatcgattcgtaagtaagtttttcttttaaaaaaagttaaaatatatatttttaaataataacacatgcaactcttgaacttacaacctccatgttattaatacgatattccaaccaactaagctaataaatcaattatgtttaaaaataattattgttgtttatattaattatccaaccaaccccgtcatgcaggatccctattccaaaaaaattacataattattcttatattaatttttattttatattctaaatattaaaatattaaaggttgattttatattttacttatattagaatttaaaattaatgttttaaattgttggtgagacatttgaagtttttttttttaaaatttacttgtatcaaaatttaaaattaatattttttttaaaattttggagcagactacgaggaccagggtgaacgaacgaacatagtgacagtggaaaaagattgcccatgacgaggatcggggacggagacttaggctttgtttgagagttaggaggggaagagaaagaaagagatttaaggggaagtgagaggaaggaaaaggaggaaaatgagagaaatttttttctccttatttgggagttaaaaatatattaagagagggaaattcagagttaataagatatttttacaattttactcttacttcaaaaattaatacactctatattttacaaataaaacttaattttaaaatgactgaatgataataataattttattatttttccttctaaaaatttcaaattgggagaataataatttttaagctttggaagttttcagaggagttttaaaaatcttcaaatctttttcctcaaaaattaaaactctcaaagaaaaaaatgtcatcacttaaatcttttatttttttctcttcccttttaaaatccatctctcaaacaaagtctcaaattaattggaggacggggatgagcagcgggggagtagtcacccgccttgccccattaacgtctctagttatcctcacatcagtcattattgaagtgacttgtaaaaagattatttaaaaaaaaaaaaattgtgaaaaacaacactaacatacagttatggaaggtttgtataatttggatgagattgtaagttgaaatcttgtcatcataaaaaaccagaaagacaaaaatcaatgaagccatatgtataacaaaaacagagaatgaacagtgacaaaggcagggaacataatagacaaggacagtgaaaacagtgagggaacgcagggaacatagtaaacaaaaacagggaatagagaacagtgacaaaggcaaaacctgagactgggaaaatcagagagatgaacatgcagagcctgaggtgaaagtccagtcgccagcaagttgctgaagaaggaaccgtaaattgccagaggaaaccgccggaagatgctgggctttttagatatcccttttctgatttctcggagacaacaaaagtgtcctttacaaaacgccctggaccaccatgttgatgttgtcatgatcctgcagccaccatttgccaccacaaggaatcctcaactccaagtgtcccacacagtgatttgctggatttctgccacgccttggcagggtggcactgccctgctgccattgtggctgtttaacaacacttattcatatttattttttcattgcaatttgtttttggaatgttaaacaatactggatattttattattgcacaatgcatatctttctactgtaggatatttaatgtgtatctttggagaaaaacccgatgaaaccactctggagcaacttgtagattgggaatacacagtatgttgccgtttgcacttggtcaagtgatttacataattaatgttatattctgatggtagtcatttcaattacagttttgtgatacagatggagagacaaaaaaaatacttttatagaacgccaaagacacgagaattggacagtctgctgggagatatccaccataaaattctaggtattttaagcatacatttgatagttccctattgttatttatttatttactttgaagtaagtagctgagcctttgcccagacttgtaacatgctctaaccttgaaatggaaaaactccacttaaaatccagttgaatgccaatccatgactttggtttagtcatgttgaggtacattggaaagcgggataatggagaaacaggcacactctataaagatgcaatattacgtgtagagttgtaagaaattagagtttaataaaaaaatatgaaattccttgacacagcttatgtgttataagagctatgtgatgtaggtagttattttcttcctaaattcaaattataacacttggtctctggtgcaaatcttacttatttgcgaattcttttattcaagatatggagagggcgatcaccagagacttgttttcacgtatatttttgttccaaacccatttgataaaggtggcaacttttgcagctgaactggactggtaagataaattttgtcattataataactggtgcttgctcagacatttttttatcattgataattttatttcagctttttgtcaatggccactgattttttattcaacggctacaagatctacaattccgtgagcttgggcttctgttgctgacataaaaacatccctttccatgtcttcggatataacccataaaggtttgccttgagtcgggcggaaaaaaaaggggggtatgttgactgaagaaaatttgcttgatataaaaaatggaaggttcaaaccatcaagtttataagaacctcttggaaatggagaatcattgatatggttaatgataaaaactggttttgtttggaggcatgttttgcaggaaatgactgtagacacatttattcctaatgacactaagattcttcatgatggtaaatagatgtagacatacataactgataattgctaacttatatcattgaaatccattttgatgacattatattgttattaatccctgttccgttgttctttacattaggaagaattaatatcatcactggtcctaatttttctggaaaaagtatctatctaaagcaggtcagttattagttctttatctttctggtatatgtattctgtatgattttgatcatactgttttaaatagcaattatgttgaaaaggtcattctatgacattaccttctagtctccaaaaagaatgtttctaaattctagtctctaaatgaaaaaagtgttgcagaactattctttagcagtacgtgtaccacgttatcaacttctggttgttaatattcatctggtctgacaacctacaaactacaattgataatatttatctggtctgtcttgatttgggttttgcatgtttttattttttgatattcactcgtaacaattttttctgttatccaattgaaaaagaatttaattaccatgtatttttgggataaaaattactttatattattattatttaataacatattattatattatttgataaatacaagaatatatcaaatttactacatgacaattggcatcacaatttaataataatataaatttattgtactcaatattaaagtaaacaatttttaatatttcttatattatcttgtttttgtatgattacctgacggtaaaatgacagactataaataaattaaaaatcttaacatttttattgttttatgtgatgagctcttgtttatccacctttccagcgcaaaggatttttgtgagggactgtcttgaagactaaaaattattaacttccacattaaagttcatcagattgttgattccttaacatacagtctaatgtgtggctattacatgatgctacaaccttgctccttgttgctctatgatcataatgtaatgagaagtattttgcaggttgctataattgtttttctctcccacattggcagttttgtgccagctgatgcagcaactgtgggtctgacagataggtatcattttcttatgaatcgtgtcctttgtgaaatgggagttacattgttgtatgctgatcttagttttacaattgtaattttttttttcctttggtggggagggggggaatattttctgcaacaggaagccggcttatgacagctgaacaatcaacatttatgattgatctacatcaaatagggatgatgctcaggtataccaagataaaggcaaataaggatatcttcaatacattgactatatatcgatcataggcaaaatctgtataatctcccagtatttggactatcatgcaggatgctcctgtcttccatattactcacttatttggtttaattaatcatttggtctctatatccatgccaacctttcgtttaagtccctatacctaaaaactttacatttagtccctatacaaggaatttttttaagttttagtcttatgcctccattttgtgacggttttacactaccagaaaacgaacaacatgaattaaaacataaaaaacttgttcgaatagggactaaaacagagaattttttatacggacaatttttaggtagagactaaaatgaaaagttgatgcatgtataaagatcaaataattaattaaacccacttgttttataattgcagatgtttttctgaatggttttatctgaacaattaaatagatgtagggttccaggagatttgtagtttattaaaagaagagtgtgtgtataactgtatatgtgtgtgtgtgtgggttgggtgtgttaattttttcttttaatgttgaggaaacctgcaggcatgctacttcacgttctctgtgtctggtggatgaatttggtaaaggcactcttacagaaggtctgttaatccaatgtttattaagtgtctaaatcataaatacatggaatgtgtgtgtactgcagatgctagtttttaccataaatgttttgatcttcctttgaaaatgatgtgtgtggtttttggaatcctgcagggctgcactgtgcactgcttgctggtaatttacaaaactgctgtttaaaaatgaaaagagtacactacgcatattgttctttctttccttttagctgataacaaaaatgtataaagcatattttatgttctgctcttatttattttattagaacaagctgtacggttcatgcaggtgtaccagaggaaatcataaaaagagcaacagctgtgttggataccgtttcaaataataaacatgttgagcggttatgcaatgagaacatctctgcttaagatcgtcaatacaaggtgtcatatcaattttcaagaaccaaattacagctttggatattgtttactctctcagagacatgttaaattatatttctgaatggaatgcaggatgccatggagaaattgttggaatatgatattgacaaaggcgacttaaaacttttctttgaggatgtattttctctagttcttaatgcatcgtgactgaactgaagtcttctgctggttgttttcgtaggaattattgagatgccatatgtgatcatgacatttatgtcaagacgagttgaatccatgttttattttaagtcttttacaaacttaaggtccattttggtaaatagtttaattagagacttacagaataatatttattatgtataagttgtttttatattgaagagaaaattaagttgaagttcatttcatattattttgaagaatttattgaaataaaaaaataaaaagaacttatgaacatatcataataagttcaaataaatttaaaataagtttcttgtaagtggttctttatattgctaaattatcaagcatcctagttactattagtttcctcgaagatttctctttgcatactgacccaaccgttgcgacatctactttagggtggataccacctgggttaggttggatcaaagttaatgttgatgctgctgttagaatgtctgataacgaggctgtttgcggaggagttctgcgtgatcattatggtgtctttttgcatggttttatggcaaacattggaacttgttatgtcctagaagccaaactttgggctatcctcaatggccttcagctagctttggatagaggttactcgcacgtcttagtggaatcagatgcggctgaacctgttcgtctctgctctactttgtctcttattagagcctgtttggatacaaggttagaagtaattttgagagtttttctactgaaaaaaacactatatttccattagagaagttcttaaaaacacttctaacttgtatccaaacagacccttggtcatcctcttctcgagagagtgcaaaccattcagaggatgtccagaattcccgtgggttgctgtttcagaagcgtgtttagagaacacaaccgggttgctgatgagatggctaagagagttttctctcttcagctttgttttctgcttttaatgttgctcctgcgtttatttcctctttgctgcgtgttgatgcagctggtctgtctgttccttagtttctgctttcttgggctttagccccttttatccagcaaaaaaataaatatattatcaagcaactttaaaatgatttaaacattaactcgtttttctcagctaaaaatccacaattaattgttgcccttgctcataatattttttagaaaattctaataattttgattattaatatgttttaccaccgtttctctttcctttccttctttcggtttgtcacagcttggattcacatcaactcttgaccttgaatcagttggatcttgtcaccttatcaacataagttatcagttatcactatagctacttggtcagataacataaatgatagtgttgttgatcatttcatcggtgcaattaaacgagtaataaaaaacaacaactttcttacacgaatgcatcttgtcatggatacaccttcatctcatgttatgccaaattgccaatcttagtatatatcatctacttcaagtaaaataatacacttggctagccagtgatcacttttcatgaagcctaaatagattactctacggggtaacaaatctagtagtatttttttcgtcccaacaccacacacttggcatttgatattgagttagataaaaaaaatgtcattgaagggataaaatcaatcgtcaacttcagttaggcagctactagctgtctcatattaatgggagatgtgtaagttgaagggccatcaaaaagtttattaacaaatagacgagcagctgcctccgtaggatggaattggtcaaagaagatgtgatcttgtctgttaggacaaaggtttgacaatggcaggcagggagctctggcattcagctctcccagtccacaacaagcaccttttacctcactaaatcctgaaagtgatttaaacttattttaattagaatccaactttataaaaacaaaagagtaaatagccaatttatttcctgaatttctatcttactatcattttagtcttgaaattaagaaaaacttaaataagtctttgaaataaacctatttttttttcttttcattttggtctctagtatgggtaacttaagtgatactactaataacaacataattttagaaacaaaaatgagaattttttttttagagacccaagtgaaacattaaaaacactcacgaacttatttgagtttttctttacttttaggattaaaactataacgaaatgcaaatttagagaataaatattggtcatttactcaaaacaaaactaataaacatggtttggtagaggaaagaaatatggaagaaagaaataaaagagaaaaaaagtgaataaatttttaagttgtttgaattaaaaggataaaaaaataaaagagaaggaagtttcttaataaagaaacgaaaagaaagaaaataatatttggatatgttattgtataaaaatagtaccgtaggaagctggagtctgaataaggtcgttgatggcagcaaaagtgtcaaaataggagtagattatgcttccattctccgattgccattccttcaacatggactgaaggccttcattatattttaccgccatgtcattggcttctataaagcattccgttttgttcttcagcctgaaatcagggcagcatccaagtgtcccaactcccgcaatctcaaatttgcgagcaccatgatcgtataatcgctgcaaaaaaaataaaaaataaaaaataaaaaaagttaccgaaaaaaaaagaagacaaagtaaatgacacacgagttgaccctctaagcacaatagaacatttacgagaaagtaacatgcatgcaaatagggtgcatgtattggaaccccggcccgcaatataattattaagtcaacggtacaatttttttgaagtttgatgtgatgggtaggtaaaagtaaagcaagtctatctattgatcagtgattaatgaagatttgtagcatagtaacttgattataatcatgttcatgtgatgttatgtgttacctgtagttgcacttttagtgagaaagccatggaatccacatactgttgcggggtgcttttcttacgaagatccgatgattcaaagtatccaaatatatcattgctgccaatcaccacaacgaagattgattttgagagatgcttctgtagaccagctgctcctcctacttctcgagtcatttcctcatgcacaattgagtagtagtccacttgtttcctcaacggtattgattgtctcttaaatgatatataataatatatattgttattaagtacactattatgccaacaatatatagaataaggggtggctcagttgggagagtaacgatttttatggaacattatatatagagagggaattcacttaatttaagagtagaattacttttctgttgattttcttaaaatctaataattaagattatgaataatgaaaataaagaataactctaaaagagttagttttaaagtaagtgaattcctcctttatatatatatatatatatatatatatataatatgatgagtaataataaaggtataccttaatttggggtttattagagccaaaaaagaaaaagaaaaaaaaaatagaaagggtagatagagaaaataataattacaataaataattaatgaataaagaaaataggattaaaatgatataaagaagaaagtgaatatatatgatcattcatttttaataatgtgcctaaggggcttttggtagatgaaaaatatttatttttgaaggaatcttaaagtgacaaattgtgatttttatgtttggaatgtaattaataaaaaagtttgtcaagaaattatgatttctgaaaatcaattttaactcattttttcgcaaaaaacattcccaatgaggggtaggaatacaactaatttcttgattagaggaaaacttttaattacttattttacatgaatctttaattttcaggaaacatattaaaactaactaaacgtattttacacatttctaagaattatgattcctagcaatcgactttcctaaaaattatgtaccacccgttgggttggattagttatgcatgtgacctggtgtgtttcaatctgactcggcatgacttgttctcgaatcagtgactcgaacttgacgtgtcatgcatattttagttttttttcccaatcgaacaacatcacttatattagaaaatttaatttataccttacatttgtattatttataaatttgcttatatttttttaccaagcataaccgcatgttaaaatttgagtgataaaattattaccatttttaaattttccttgactaatttgtgtgtattaaattctaatttaaggttgtttatatatattgaattatgaaaaaaatatgttacatgctcaaaattttaaataaattcataactatatttttaaatataataaattttattaaattttaaatcttaaatgtacaagcttacatgttatgaaattattttaatttttttaaaatataaatcggatcatgcaagtaaacagataactcattagatcaatatctaacttagtaactaaatatcgaatgagttaataattagtccgaatctaataacattggttgagaggtgatccaaaacatccaggctcatcttgggtcagattcctatatccctatttaatttggcccatatattgcataaacagaataaataaataaataaatttaaaaaaagcctggaggtaataaaaaattaaagggaaagagggaactacatttggtcacttacataacgttcgtctgtaccatcaaatattccagcacctgcagaggcaaagctaacaccatccatgaacgatgcattgtttttgttggcctttgatgttataagggacaggtaaggtggtgaagttggcaaacccaatttctcagctgcaacccacacaatcattctattaaaaaatgtctctatattctatacaactgtttgaagtggcatattaatagctagagtgaatttggattcacttaccaacaaaatctgcagcattcttgccgttgctaaatctcccagttggtttgtgtgtaggaaaatcaacaccatagtgacgatgatttgccttagcaatggaaagagtcaagtaattgttgttgcccacgtcaacaagtgagtctccaaacacataaacggcagaaaccatttcagcctttgaggaaccaaagctgaataagacgaagaaggcatggacaataaggaaagctcttttacccatcttggtgggtttgtttgtgtgtgctccaaattgtttttggtttagggtgtctttggaggtagacaactgttagatgattgatatttaaagataccacaaagctggatgaaaggtacacgttacgtgtgaaaagataaatttgattgaatgctagtgagagatagtggagcaaagagtattttccagatactccatccacttattttattgtcaatatgatgtgtcatatgttaatgggacaaacattgtcaacatcaaaagtaaaattcttaaacttgttgccttggtttttagtgttaattccctcaacaactaaactgtgacaaagttaagtaggcctgtttttgataattacccaactagctaggcacaactctaactcttaattaaatttagttagtttaatttataattaatctgatcgatgttgctgattaatgaaccttcgaaggcacagatcaatacatcatacatgcatcacgtggcaccctatatctaattgaatgaccaaaaaaatatttttagtggtagatcttaaattaggattttagaccactttttagtggaccctatagtaccacataggattatagatttctcaaaatttctctaattttttcctttaatggtagatctcattttcagatcttagggaaagagaaagagagagaaaatttattcttttttgaacaatgtgcagatcttgagggatcttttacaagaactcattctccatattggagatctctccatttcctttattgggagatcttgtgaagatcagatcttgagtttaagatctttacttaagatctaccactaaagatgctctgatgaacttcgaaaataattactatatagtatatgttgctcaactgttctttatgatttaataaagtagatgggttgtatataaagctagcagaggtagccacatcaaaatacgcaacatccgacaagtaaaagcctcattcagctcaaagtaaaaggttctatatatatatatatatatatatatatatatatatatatatatacacttttatataaataattaatgctttgaacttaaagcttttaaagctaggtcaaaccctcatgttcataaagtgtacagtagtacacgtttaaggtccacagtggtccccccaatattttggctttgaaagcactgctgaatatatattacataagaatttcaatttttcatgatcacacaataccaccttgacccaatggaagtcagcttgtaacatatatgcttcatcccactataaatcactccccaaattcaatccggcattcatgcatatatataaattttgatgagctaaaatagacttgtgattcgaattcattgcacttttgccgccccatatattctttccacttctctatgttcatatcatgattttgttactatagtagaaattctaaggaaacgaggagcttaataaagttcctttcattccaattcatctttgtgtggcatttgataaaagacactgaagacagttttctgaacccaaatctttttaagccagaacttcgacaatatcagaatctttggttggattaataaaatttaatagatacagaaaaatatattgaaataagtaactttattaaaaattattcttaaaataatttgatctatcttgaaatgtgtgtatatgtgcgtgcatgtgagagataatttaatttatgtaaacatctatttctaactaatatggtttaatcattttcctacgtcataagtcttatgatgtaacaataaaatcaatattcaatagatgccagtgtaaaaataacaatatataaattaaaccctctcactctgtgtatatattccacagacctccattccatgatccctttacaatttaaggagagaaaaaaaacaccattctctgacattcaaggggaaaaaatatagtaagtgatatgtgatttattcgtcttcacatgttgtaaatccgttcaaataaaatattacattttaggagcttcactaacaatttgacagagaaataattaatatttattggacgcaaaaggactagcatttagcaagaagggtacaatattcacacatagacacactttttaaagcttttttttttttggtccaaatagaaactattgcttattttcttaaaaatatttaattatgtgcaacttttaaaaaaattattcaattgaaaatatttaaggaaacacaaacaaacagtacattgagttcgtgaaaagaatcgatagggcaacccatcataatgttccacaaccacacaagagaccatgaccgtcccgacgtacgcatttacggtggctccgctcaagttacgttttgttttcagactctttcaagttttcaacgtcacacacaacatacatcatttccccacactttgaaacttaacatttttttttcttagacccctttatttatataatcatttctttggtttacaaaaaaaaaaaaaaaactttatatataccacttaaaagcccgtttatctaaataggaacaactttttttctttaatccgattttttttttttttgccgccagttattaaaaaagtaatctctcaaggtattataaatctacttatggacttgacatcttctaacacatgtttttcttgtaagcaccagtctaaaattaaaccctaatcacatatttaaatgttaaccatgtcacactacatgcacacaactatttttcgaagttcatgtagctttgtacgttcatcatctaggctttcaagaagaatacactacaatttttcctacttaacaggttctagtaaggcttaagtagtaacccgccaaaaaactaacgagtagagacatatacttacggtcaatcacacgactcacggttaactattacattgtacatactcgtacaaatatacgtactactattatattgacattttggcgttctttaattctgtgcctgcttcttgaatcatgattgagatttgagacaaatatatatatgaggacatagattacaaactcggctgaagtttcgaaatgagaaaggaataatctatgaaataaaaggatgtcatacattcatacaatgaatccatgtagttagacagagattggacagtttaaattttaagtttgatataaaatataacttgtttaaccattcacgattgtgattgattgaatatgtcaaattcttgactgtaggaaatccgaatctgaaataaaaattagaaagaggtcacaaagatttggacaagtacccttacgggagtacatcatcaagcatgaaaaccaaaagtgagattattttaactcaattacaaggcacttgtttaagtgttttttgtttttttttttttttaagaaatcaaaatataagagtgaaaatatgtttacttaaaatttaaaaaatattttcaaaaactgacctaaaactgaaaacaacaaatcaatattttctacatttttttaaagaagtgaaaatttaatgatatcttaaaatagttttttcttgatatatgttttttaaatcttgaaaatttgaaaatgaaaataaaaaataaacactcaaaaccaagtacattttagttgtcttaaatttaagttttaaatatgtacttatatttgtgcaaaaaatagaattatgtagttgtattaaatattctgatattttaaaaaaatgatacacaaaaatatttcttaattcttgaattgctcttgatgattttatcccaatcccaatttcctgattaataatgcatttgtggggaattaagtgattatgaaggttgttgagggagagggagagtttgtgattaatatagaggtgtttggttgttccataagaagaaggaagcttgatcgatgggttgcaccgacagctccctctcaccaacgctgcaacagcagctccccagcggatgaggattgggatgaggattgggtttgtgttggaagtagaggagatggacttttatgggtttgaaaaaaaatgacattaattaatagtgttagaggaggccaaagtaatgtaaaatgagagagaaaatgcatgtgaaatttgagtaaaattcaaggaaagttcaataatttgctcttaataaaattcacaagtagtttgattgcattagttgtggaacaaagaaatataattaatattcggaggccaacactatgagacttgtcaaacaaaagtttttttttttaagtgaaaaacaagagtttgcctatcaatatataaatagacaataaattatttttgttactaactaacttaatgaataattgataatgtttataaaaaaatacaggtatatcagaataaaacaaaataaaaagtttcacaaaaatattgagttattattatgaacttgttttcgtggttgatttttgtattgtgtgttgtaggtaaaattccttatagtcacttattttaatatttatgtgatttacatgagaaataaaaagtctgaaagctttgagacaaaaaaaataataaaaaagaaaaaacaaaagcctgtaatcaaaagaacatgcatgtcgagttaaaaaggagaatcaataacttgtatgcaacccctttttaaagcttgcaaatatacatgcataatttaaatttggattaaatatcttttgttattgcaatttaatgtatttctttaattttttgccttgtattttttaaaattttaattcttacaaattatgcttattttattttgtatctttaaagtaatttatataactctttgaacagtaaaaaatattatctaaaccacttaaaaatgaaaaaaaaaatcataatttataaggatcgaaaacatttttttaacggcaacaaaaaaaatgctaaattaacattactaaaaaatgatttaaacctttaaattttaaaacacatatcaaagcgttaccctacggaatttattaaaaagacttaaaaaagtattattcaatgaattgaagggaataagatattcatcaagattatgtattcctatttaaatcctggaaagagagacaaaaattaagtaaagtcaattaatagatgcaaaagttggacaaaggagtactaactcactccaatttcatgaacctaataatcatcacaaaatagattaagaaaatcatcataaactttcctttaaaattctccattgtaataactaaaaaatctgcattactataggagtattttattccctcactctagtacagtagtcattaatccaatttgtcatattaattaattaattaacttttaagttgaggtgagatttacttgctgtaagaggtgatagttggtgaaaataagggggaaatgacaaaaagatgcgaacaacaggcatagaggcatgcgagggacggtttcgggcacgggcagcagatgccgtcattcccagcctgtcacgcggtttcacacacacaaaataagaaaacgtttattggtattaattgtatttactagtttattcattattaattatagtaataaaggaagaaagagaaagaaatgaaagaaataggaaaaattagacactcaaagtcacgcaacttacctcactcatcgtaatccgaagctgaggtccgagtggtaacaatcaggctcgagcctcactgagcttctcgaaaaaagccaatgcaatagtcattaatccaatttgtcatgttaattaattttaagttgaggtgggatttacatgcctcaagaggtgatagttggtgaaaaaataaggagaaaatgacaaagagatatgggtaacaggcaaagaggtatgcaaaggagggttcaagccatgagtagcaaaagatgtcgtcattcctagccagtaacgccatttcacacacaaaataagaaaacatttattgatattaattgtctttactagtttattcattattaattatagtaataaaggaagaaagagaaagaaatgaaataaatagggaaaactagacactaaagtcacgcaacttacctcacccatcgtaatctgaagctgaggttcgagtggtgacagtcaggctcggacctcactgagcttctcgagaaaagccaatgcagtagtcattaatccaatttgtcatgttaattaattaattaattaatttttaagttgaggtgggatttacatgctgcaagaggtgatagttggtgaaaataaggaggaaatgacaaagatatgggcagcaggcaaaaaggtatgcaaaggagggttcaggccatgagtagcaaaagatgtcgtcattcctagccagtaacgccatttcacacacacaaaataagaaaaaatttattgaaattaattgtatttactagtttatttattattaattgtagtaataaaggaagaaagagaaagaaatgaaggaaatagtgggaactagacactcaaagtcatgcagcttacctcacccaccctaatccaaagctgaggtccgagtggtgacagctaggttaggacctcacatgcaccattgaaaataatggagcctcccaaagcaaaccaagagagagaaactcaaatagggttttagggagagatataaagagagtgagagtaagaatgcaacaacaacaacaacaacaacaaatgatggatcagatcgtaacgaagaagaagagggggcgtccctccaaggcagatctggcttgccgttccgacaaatctttggccacctcgcaaccagacctccgacggagtcttcgtcgccgtcggaatgtgtgctacaacattgactacctcaacgaggaggacgaggaccaggaagaggacgagaagaggcacaagaagaagttaaagctcattgtgaagctcaacaacaatgaagaagacaatgatgaggatgactatgagccgagtcgcaaaggggagcgtggggtgcacgcatcatatgaaaagggggaagaagaagaagaagaaaaagggaatgaggaagcgaatgagtatgaagaagagcgtgaggtaacgaaacaaagtgttgaaaatttgagacaatgtctacctcatttttttggtaccaattggtccataattgaattatgtttactatctctctctttgtgtcgggaatttgggggaaataagtaactaacgggtcaactataaaaaactaacacatacatccagactctctggttgtgtttgcttccattttattaacccccatctctctctatgactataaattagataacctaggacccattgttgtttgtctctgtctctgtctccattgcatatttttattacataaacacaatatttgccttttttttttggttttgggttatgttatttattttgtgtgtatgggtttcttgtgataggtaaagggcataaaagtggattctaaagggctttactctattccaggtttgtgtgtgtgttttgttgttttggttgtaatgtaattcgtaattcttaattacataatttcttactttttttaaaaaaatgtaccatgttggatactgaaacaggtgtgccattgtttcttttattgcattgttctcttgagtttcttaactaggttctttattttgtttttgtttctagtgttaggaactccatcaaagcttccaccttggatttcgttgcctgacaagaggaccttggagtttatccttgacaagcttcaaaagtaaggcgattttgtttcccattttctttcttcatgcattcctgttggttttaattgtggtgaatgatttgtataacatcttcaatcttcaacttttattgttgcatggcgatgccatgtcttttggtgaattgacaggaaagatacatatggtgtgtatgcggagccagtggatccgaaagaggtatgagggcttttcttcctgttaattgttaatcttgcttttggaaggcaatctaagatgaaagttcaaattatgtttgaatgcagcttcctgattatcacaaagtgattgagcatccgatggactttgccacagtgaggaagaagttggcaaatggatcttattctaccttggaacaatttgaggtgtgtaaatgtgtcagttgttactgttgaagttggggatgttccttttcttttctgagattttggttatttttgcaatatgattatgtgggttgtgagcaagaggttgttgcatgctatttatgtgaggggaaacatttaaatggcttacttgtcagtataatagagtttgtcaagatttattcacttatgttgataatggaattgtgtaggcaatagtgatttggatgtttttgattgaaactagtggggaacttttgcgggagtatactatttataggaatcatatgaaatttagcataagttatatgtaccttgtttttttcccttgaggagtatgattttcgaaccttgtgcatttttttatcaacaaataaacgatttcattgatcaaagagatataagatataccataagtaaataatctaaagaaaagaaacatccaagtggctatctagttggttatgtcatatttggacgaatgattacccaatatttcataaccaactttcagtttctgtaaaacttatccccttgctcgagaaaaatctctcaaacacctttcctatatgatcatcccaaacatgcatacacattgctagcccattgttgtaatgagtatgagagtttagtgggtggatgtttcaaccatgtccaacttacatatatgacctcctataggattttctttgaattaaaaatgccattgttgaagatcatgttattacgggatctccatgtacaccacaacaatgcacaccatataaagactcattttgttgttgcctccttcaaagaaataaccactccactgttgagatatccttccacttataacatagtacccaccaccactgagcccttggactgagaaataacaaatgttcaattgacttcaatttctctaagcaaatagggcatgatgcttcttcctttactatatagccacacatctctttttaacaggttgggccttgttggtaatctgtccaacatggcctccatatcatcactacaactttcggtggtaaattggtgttccatataaatctccatatgtcatctgattggtcattgccattgtctacctgcaatgatttgtaggtagactttgttgaatatattccttttgcctcaataggccattcccacctgtctggttggtctctttgcatcgacatcgaattcaagttttgatataattgttctagagagggtttctcctaatcaaagcactctctatgccactcgaacgtccactcccaaacctcacccccatcttccaacacttgcaacaatcctatcttgttggttagaaatatggaagagcctaggatacttattagctaatgactcacgacctaaccatgtatccctctaaaatctagtatttttcctatctcccaccctccatctcactatactatcaaaccaattacctttcttcccacccctacacccttttttaatgttcctccaccaaatcgaatattctcttaaagaattatcattgagtaaatattttcatgctctgtaatttgactccatcacattgctccacaacatgcctttttggtggtataacttgcacctccattttgctagtaatgctacattaaaagtaccaaggtaccttacccccaaacctcctttatttttatctctacatatctcatcccatttcacttaagatattttcctatcaccttcccctccatcccaaaggaaccttctttgtatggacatattttttttcaatacaccacatgggatcttaaataaggaaaagaagtaaagcggtaatgatgaaaaaacaaaattaattaagcacactctatctgtcattgagaggatcttatggctccacccactagtttcttctcatacttttccacaataggtctccaagtcgcttgtcttcttggattagcgccaattgacatgtcgaggtacacaaggaactctcaagaacctacaattcaagatatccgcaaatctctccacttcaactcttggcaagcctaaagctccaaagcaactcatggaaaaattgactttcaagcctgatactaactcaagatctcaagatgctcttgatgtcaattacattgttcaattttgtttctcccaaaaacaataggttgacctccaccttgtctttaccaattagagacccatttttaaagcttccatcatcaatcaattcaacccttatgccactacaagaaagagaaatggttccattggatccctttgtcaaagacccctttgcatcttgaaccacttgtatatccgcaaaccttgtgcattaaagcagctgctgaatatccgcaatccattcaaacgttgtgcattaggctaccccttattatcatctgaaccatttttaaaccgtacatagtatattgtcttcctgatttagtgattttgaaaggcaaataaatgatttgaatgcaactgttgaatgcagagtgatgtatttttgatttcctcaaatgcaatgcaatacaatgtggcggagaccatataccacaaacaggtataaaattgactgctttcccttgaaaaattaacgcaagtagcaattttgttgtgcttgctgtatgatccctatatatttgttacaggcacgatcaatacaagaactagcaaggaaaaagtttgaaaagttaaggattgattctgaacgttctcaaagtgagctgaagtctgaacaaaaaaggagatctaattcccttgttaagaagctagaaaagaggccgctgggtcatgcttcacaggaacctgttggctttgattttacctcaggtgcaactcgtgctactattggtgatgtactgccaacttcccttccaatgcaaggtgttgtatgtgaaaggcctggcaatattgatgcccttctggaggggaatgctttattgattgatgcaaatcaagagaaagcagaaaactatatatcaggtatcacagaagaaatgtctatttcatgctatgatacacagaaacaatactgtatcggatacaatgatacgattattttaaaaatatatataatacattacgtgtaagatacatatataaaattcataaacatgataaatatataattataattttgcaaactaaattataagcatacttcttgaacattagtaaaaaaaattattgtacaaattctgaattgatgagaaacttgcattccatttaatttaattgaaattcccttacatgtctctaatgaaaaataaaattataaatgattgcatgtcattataaattactttctattattttgaatataggaacaatactatgaatcttattcctttcttaaaatcatacataaagagaacaatttttatttttggttcattaagggaaagtgtttctatattatacacgcttacatgtttcttgtagttgtattggactttcataaaatgctttaaaagcttggatacttcaccactaagtatatcggtaaagtatagaaagagtatcgatattagatatgtgaagcaaattaaactattaattgttggtgctttatagatttggatacttcttcggtatgtatcgatgaagtattttagagtattggtatcggatatggatacgtgaaacaaattgaagtatatgtgcttcatagatttcatgccttcgttgttcaactttgcatactctcagttggatattactgtcattatctagctgttcgcttttgactgttactttattgtttcagggagggatctgctctccaagttggaaaggaaaccatctgtgcaagataatatgtctaatctaccagctactagatcggattccatatttacaacatttgagggtgaagttaagccacggctagttagtgtatgtatcaaaaggagtgaattgttatttctaatccttgaatagtttagctttcttgtttaaagcattaatgttgtatttttcggcaccaggttggaccacaagatgaatattcatatgccaggagtttggctcgttttgctgcaactctgggacctactgcatggaaagttgcttcccagaagattcagcaggcactgccatctggctgtaaatttggtcgtggttgggttggagagtatgaaccacttccaaccccagtattaatgcttaataatcatgcccagccacaacctagtttagcgactaagttgcagtctactactgaattaatagaggttgaaacaaattgtaagaatgtggaatccaccatggaacaatattctgttaatggaccaatggatgagggaaaacagccttcagcttgttctagtagtgggcttacatcagatgaaaaatcatccttgtttggttctaatgaaccaagacccaattctcatgtcaatctcttttatcagcagctcaatgtccaaaccaggaacctcaacaattatgagaacaagggtttgaaacaagtggaattcaactctttaccctcgagtgatcagaataatgcaagtctagttgcaaagcttacaagtaataatacagctgcagcagtgtatgagcccaaagaaatggtaccaagtaacatgaatattggttcccaatctcctgtgtcacctgcaaaacaatcatctggtgtgctggttgactctcagcaaccagaccggcaactatgacatggaattattgtatttctgatgtggatgcttccacaggaatattgactggttgtggaatttcatccaaaaaccttcttgcatgcataaaaaaaaaaaattgttttccttgtgctacttttagaacagatgaaatgaataccatgtgcttgggaagattgttttcccttggatgcttatgttgggaatcttatgatggttttcttaagtaggatttgtgatcgccacagaagacttgagcagatttggcagaaaacaacttcaagactttccatcttttccagatgagaactaccgagttaatgcagcatgtctgtgttctatcctagagttgaaaccatataaaacatttaggagtcgttcatgatcaagcgttacttagatttttcaattagcgggcaataaatcctgttgatgatgctttctacattctttacaaatggttgaaattcggttgccttgatattgatttcattatgattacttgtttatctgaattgatggggaaggcatcacttgtttttagttcttaatgctgctatatttttctgtacatgtctcgaatgcaaaacctcaacttgcttttccttgtttaattttacccgactctgctagttcaacatttaagtaaaatacggtacaccccttcggaactagtgttttgggtgtttcgggtgtaaatttgtttctaggttgacataaatattatggaggttggagtagcttgtgattattagaagtatcaaactatggaaatatgaaggttgaagtggcttatgattaaaaaaagttgttcgaagattgatgcatttatttgaaacaaactaaacataaaaatggttaaattatgttcctcagttctcataaatgactttatttagttttaattttctttggaaatacgaaggttgaaatgacttatgattaattttttttttttctaagtctcatgcatttatttgaaatgagctcaatattaagatggtttaaaattatgtttcttaattagttctcataaatgactctatttcattttttattttctatttttttaaagattctaaaattgttttagttattgtaaattttaacattttcaaaatacttttatcactattttagtgacaatgtgacattaatttgttgcattacatattatctcataattattgatgctagatgatttatatctatgtcatagttaaaaaataatatgaacaaatcttaaaaaaattaaaattgataagaattaaaattaacaatttatttgaaagattaagaccaaatgaagttatttataaagattaataacttaaatcatatgaaatttgatgagtttagcttatttaaaaatacgatctaatgcggctcacgagaaacaggctcacacttgtatgtaacatgtttggttggaattacataatgtggttattcacatatattggaagatgattgacttaaatcattttttaataatttttagtcacttttaaggatagcaaagagttgtcttagacaaggatttataaaacctgattataatatattttttaaacctaaaatccgagtctaacctatttatataatatagatattttaaatatctgacctaatcttttaaaattttgacctagaaatcctaattagtaaaatctcctttgtaataaaaccttttaaagtagcttagaatcttccctttaaataatctaatgaacttaaaattatatgtaaattaattagtttaagtttttaattaaatatattagcaagacttaaaaaaaacatacaaacaagaataaaatatcaaaattaaatatcacgcacagtgaaatgttaatataattataattatgattcaaatacacagatttattatgtctgaaagattttttaaatgatttaagatttaattttttgaactaaataaaccttaaattaaaacaatagtctaacttgtttaacagatagacttaagctacgtttgtttgtttaatatggatttggcgagaagttacccattagttcattgcgttacttattcccatacccttgtctcactctcacccctaaagtggaacttagggcttttgaaagtaattgaataaataatagctttgtcaaccgcggatttggtcagttgcatgtccctgacggtcttgatgctctgaaggagctgatttgcaagcagggaattctaatccccatcataatgtggtttatttggtgtgctaggaatccagcatttgagatgattgagagtctgtttagatataaggttagaagtctttttgagagcttctctactgaaaaaaaaaaattatatttctaataaaaaattaaagttttcaaaagaacttttaacttatatctaaacaaatcctaaacttcctgctttaaggtctcagcattggttttgggaagcaaatcaatgcacgaatcagcttcagctgttgcatgaagctcctcagactcagatgttaaaggatagtcttatggtggatgctttggggattaagtttcctagaataatgatttaggcttgttggttgttttttgttttccttttttctcgtttgtaaacaaaaaaaaaaaagtcagtttagctctctctgtcagggcattttggagtgatgaaaatgctcatgtgtaactactctatcttcatttttggcattttcaaatcctttgtaacattaatgtacattaccaactgtttctgtgacataaatacagaagaaaaatctttgatgagtatttatgatgcaataggaagaaagataaaaataaatgagataccggatgaacatttaaaatagctagatggatatatatattcactcacacaagaagcattacttaatcaagtagaaaagtcgaacagaattttccaaactcttatattgattcaatacatatactaaagagcttttaagctacaaaatcaacccgtatctttaaagtatacttcacaaggatcacaaacagggtagcatatgagagatctataagttgttaattaataactgaacattaaaaataaaagttaaaatatctttaagaatttaagattactagaggtagaatttataaatgatatagaataagctacgccgttgtacaacagatgaaagcgatcaaagaatcaaatatgaaaccaataaaacgtaaccctgtagtgttgatgggctgatggcatcatgcagaacctgagcctctctctctccattcacaagagtgatatatatatatatatatatatatatatatatatatatatctaacaactagaagaccttttggcacgacgagcaaacgaaatccgaaggctatgtcttgatttcttgctgttagataatgtctgtggtttccccatgtttgccttcgggtttttcagaacacaaacattcccatcgcatgtgtatcttttggattcttctggtgagccctcggagaagcacccgaagatgtttgagaggtacatagctattgagaataataactaatgatcagaaatatacaatacaaatttactctcaaacgattatgtgatgccaccccgttgtgtatatatagttctggtaattgcggccactataattaatgtatggtcaaggttggcttgccgcttcaaaaatatcttttccttatttgtttatcaatatttagggtcacgcgttgccttcattcagagaaactctcacattatatggtcaaatggtttattagtatcaaaacgtgttagattattggttgcttaattttccgcgtgttcacatcttccattttaaattgcttgctttctagaactgctagtattttttttatcatatacagcttggtgcacacacacacacatatatatatatatatatatttatatttatatatatatatatatataggagtaggaactctgcgtgacgtcgtatatatgataacaaacactgctagctgaaaagggcaatgttaacaactgaatatacttgtctaggaaataaaagtaagaaaaaattaatatttattatattgaaacataaaaatcatataaagtactccttcattaatttaaggataatggttccggagtcttcattaattttttttcagaagaaaaaaaaaacaaatgtaagatatgttttagcaacaaacacaatatgttttcgttaatgacggtaaaacaaatctgtcaaaattcgaaagaaaaaaagaaaaaaagacaaatatttgcatgccgacgactagtcaccttgcaaggggtcaaagcacgtggattgcaaacaacaaaaacaactcaactaacccatggtatgatacatcgacatcgtcaaaattgagttaaaaagacaaaagctaatgtatataggtattgggaactccaaatttaagaaatgaagttttacccactctgatcaacaggtatcgttgttcgctgaacagtgcacccgtcatattttcaattgaactagctagtattcaaatcttcatcttcagtattactggataatgatgaccataattttttgagtctattgttcaaatgcaagagtagggataagaagatgataatacataaaggactagtatagttttagatatgtgaagaatatgaagttagaattaatcagctactaaaagattattaaaaaattgtattgtttttactttgtttaatctaaacattaacatttcttgattagtttttttcacgactcttgtgattttaaatgttttctaaaaatatatgaaatcctttcaaatcttataaatacataatattatatgccatcttttaaattcttattatataaattcaataaaatttaaactataaaatcttgattataaaagtctttcttttatatcaaaataatatttttaaatctaggccaacaaacctaaatagaaaacaaatgtatcaagcttttattaatgttaatattaataattttatgcatatattaaatatatatatatatattatgaataagccaatctattaagtttaataagctatttttaaagtttaagtcttatctttttaattagaaaaactttttaaaaaagtctaagtcaaacctttttaataaataaatcagattaagccttgagccctttctacctctacttatgacttgttatggttggccaccaagtattaagcatgtactatatgcgtggtccataaaatatattacactatatgtatggtccgtaaaatatattgttaaataataaatttattttacaatagtaacaacgaacttaagtccattagagactcccaaacaacaaatttatcataggttcatgaaaactaatgaacgtttctgacaaattaagagacctaggttcatgattttagatacctatttacattctcctcaattctctattcaattaaaccccaattattcattttaattactaatcatgaaatattattttaaattaaggtaattaaattaaacacattcctcccaaaatattattttaaataattaagtgaatcaaataaattatgaaattttcaaatatctttaatttcacgaaatctattaaacataaaaaatacaaacaaattcaaaaactcttagccttttaaataatttattgagtagaataagtataaaaaacatgaataatttcaaaaactttttaagtgtgagggagatactttgatgtttaattatgcacaactttgtgaatacatgtgtgataaaattgttctatttattgcaaaaaaactacaattttttttattaatttgatatatagactttgaaatatattagttgataattgatatataattaaattatacttgaaaaattaattcaaatttttacttgacaaaaaatataataaaataaaattttaatttatattaatataatatagactttgaaatatattaattcataatttatataattaaattatacttaaaaattaattcaattttttgtttgacataattgcattagtaaattttaatagaagtagaaaataaataagtgtttacttgaataatatgatttttttaaagaattaaaattttataaaaattagtttaaaaaaatgttttcaaaaagaaaattttgaatgaatattaatgtgatatataatatatagaaattaaaattataaaatattaatttctctagataagttatacttaaaaagcaatattgatagaagaatttgatggtctgacattataaaataattttacagtattctttaattacaaatcaagttggaatgactttcaaaataattattataaaaaattaaaatttatcgtacatgataataagatatgatttaatgatattataaaagaaatttatgtaattgactattaaactattttattcatcatatatcctatgtaaaataaaaaagatattgggataaaaaaataataatttagttgaatggagcattaacaaatatattaagtataaaattcaaatacaatgttattaaaaaaaaaattccattcaagatgaaggaaaatttaaatgtatattaatacaatatttagaattagaaatatactaattttgactttatataattaaattatacttgacatgttgatagaatatttaatattattaatatagcatttatataaatattaaaacaaatacattttattatatactacgacacaattttggtatttaattataatatataaaatttattttataaaatacatttaaaaaaaagtcaaatggatattaattatcaagataagttgcttttattagaagtcaccacttagcttgatctccaacccggccaggtctcttacctccaccattgcgtcgtggccacaatgcccctacccttgttcggcaagtggaatgctttatggtctatagtcatacttattttcactaatatattttttactgcaatttcactaatattattaagacttatatttctttttttaataataagtactaagataaacacatttaaaaatttacatattaataaaagatatattatgttaaaaaaataaaacaataataaattaattccccgtgcattgcatggacttacatactagtaaaataaaaattagaacatcaaataaaaataattttggtattgtttcttcttttttttcctaatcttcttcctaatttttgggaaagctaaatatatataaactaaaaaaataaatctacaaaattttgttcttcacaataattttttttaccaacataaaaatatgccaaaaatattttataaagtatattagtaatattaattttttataagaaaaagtctaatcacgtttacaaacaatattataaaaaatacataatttaaattataaaaacgagcacataattcaaataaatcaattatttcttaaacacgttatgccttgaacaatatttgattacacattgagaaattttttcttaattttaaatttttatttataatttttgcttttaaaattattaattgttattataattatagtgtgattttaattttaaacttttgataattacagtaatatttatcaatcttaattaaaattgtattcttaaatcttaaaagtaaaattataaatccaataacaacaaaatcttatgattgattaaaattaacgtgttttatttgttttgaataaagttattattgaaaataaaatactctataactttacatcaccaaaacatatatattattttgaaatttaaattatattttctaaattcgaattacaatcttgtaaatatttcaatttcaatgcaattcaacaaaaaaattaggtagaagattataaaaaatatatatataaatataattttgcttgaaaatttcgcatcatttactaatcattggtctttaagaagacttattctcagaatacctttatatactgcggatgatttgatagtattccaattttttcgctttgattttttaaattattatatttttattagttgtaaaatttgttaggtttgtgtatactcatatataggtacagagagagagagtagagaaatgaaacctctaatatgcaacgtagatacataacaatggcaaatgaggaaaagaattcgggaggagctgtaaaaaaagaaggtgattcggttgatatatttttgaggaagggtatccgtgcctggcttacactggaacaacaaaagaatcctcacttattttcattcctccaggatgacgacactgagattttgaatagcatcctcagaagacaagaccaaagaaagagagaagaagaaagaaagagagaagaagaaggcacgtccacgaaaggtgctagcaatagcagtgctaataataatgttggagattccaagaattacaaggccatgtgaagatattaaagattcaagaaatgaagggatgtgaggtgaagtttgttggaactagctctccctagatctctgaatatctacaagcacttcagtttatctttgatccaaaaaataaactctatgcatttgtctttaagttcaaacaataactctgttgcataacaatgttatatatcctttagttgtttatgtaacaaattaaactgactcgtacttcacttatccatcaataaattcagatcattcttttcttctatatggtatcacaacctaattgcctgtgtatagggtaccactgtctgccctcctaaatccatcaccatcaatggttccggaactgatcgagaatccaaattattttttaatgttctattcaagtaaattattttttttaatctgaataatatgttattaatttcataaaatatatcttataaacaaacaacaccgtcaccactgcgttcgccacaattcccctccccttgttcagtggaatgctttgtggatgctattgccgaagacaattaccctgtgctgcatgccagattagtgaaggcatcaaaggtccttgcatacgtttatcaatccatcacgatgataatgaatcatatttatctcaaatacttgttagatttcgttgcaatcaattaatcatgatgataattaattataagttttattagtgattaataataaaggttttaaattgcaattgcaatagttgaaattttttaaattctttgtataattcaatatgatgaaagttgctttgtcatttgtgactatggtaggtaactgggcatgttttccagccgatggtgacaccagatgttgagatatatatgcatgccatataaaatattcaaggaatggagacttaagtattgctttgctaatctctttataaacggggagcttattgtgtcctccacctctgctcaaaagtatcttgcaaaagttcaaagtttcaaaggatgccttaaataaaattggatgttctatcccctcggttaatatgaagtctcccatcaatatggagctaacaatatacaccaatgagggtggtaccttggctgttgaagatgccaaaaaaaaaaaaaaaaacacttcatgattattatttagatagcagtacaacttggtatgtgaaatcacgaggcctattgattactttgatcatatgttcgtgaaattgagagagctaggttgccttatttgtaaaatgtatcaatatatcaaaaaacaattaataaaagagatttcaaagttacttcaatttgttgcaaacaaatgaatctacctagaccttgaaaacatattaacttattggaaagcatcccctgatattaagtaaaatatgtagacatgtaatccatatataaagaaactcaaataaaagttacatttataaataataacaatgtacgtaaattatatcaattaaaaacaatttggatcgataaacaaatttatgtattttgtactgttcaatttaattatagtcaaacgctaggctgaaggaagagataattaacaggaactagaccaaaagataatgatataagaattaaaaaattattatttaatcataagacaaatttatcaaacatatatgtattcacgaatttgtatatcattaaacatcaaagtatctcagcacacatttgtccttgtcataataactataaaatcttgttacacacatacaatatcaaatgtttaagtggaccaaacaaaacattttatttttttcttatctcaaaaaagtcaactttgcttcaaagaactaatgcttactgggcaagaaaaatgtctcacacatgcaagtaaatagccttggagttaacttattaacattagtaatgaagatcaattcgagggatatatatctattttttatgattttgttatgaactaaaatgataataaattataaatttttttagtacttggatgtgtaaatttttttatagtcaaacactagtaataaagatcaattcgagggatctaacttgatttttttatgattgtgtaaattttccgttttacacaatgattagagattgttgggtgtgtagtttgaaatctattgctcccatgctattaatattattgaatgtattaaatgtattaagtagtaataaaattaaagtagatttatttttgttttgtaaggattaatttaatgattatgtatttttctttgaatttttattttgaataaaatattgttacaagataaagattaaattatattttagataaatagttatttttgtttcatataatattgataaattcatctatgaatatcttaattaatcttttcataacgaacgaaaataattatttatccaaatattattaaaattcaattcaatctaatacttttttttcaaattttattgtttactatttgcagtccttattaaattgattcagttatcaatatgtcaattttttttcccgtccaaaaaaaataactgaatttttttattagacagagactacatctagactcatggatatatatatatatagaggtatagagagagagtagagtaaggaaaacttctctaatctgcaacgtagatacataacaatggcaaatgaggaaaagaattcaggaggagctgtaaagaaagaaggtgattcgattgataagatactgaggaagggtatccgtgcctggcttacacaggaacaacaaaagaatcctcatttattttcgttcctcgaggatgacgacactgagattttgaaaagcatccacagaagacaagaagaaagaaagagagaagaagaaagaaagagcgaagaagaaggcacgtccacgaaaggtgctagcagtaacagtgatgaattgccaagtccatttaaagaaaagattcaagaaatgaagggatgtgaggtgaagttgctgatacagaagaaactttctgagtcagacttgaatccaaacctaaacgatgccagcttctctatgaaaattgccaacaattttctgacacaaaaggaggagtcctttctagaggaaaacgaaaggatttctggcatgcacgtcattgtgttggatccttctcttagagagtgcaacatgtgtttcaagaagggttcaagaagctgcttctacgacttgaccaatggatgggacagaattgtgcttcagaatgatctcaaactgcatgatatgcttcaggtttggtccttcagagtctcctctcttctctggtttgcacttgtcaagctgtgaacgaagatgccgtacatgtgatgtgatggtctgttatttcaatcttgataattactgtaaaagatctatgaatgatcaccctcaaaatcctctatgtcaatttagaagggtctgaagatattattcacttccaacactttcaagaaataataaaataccaattttctttgcttgtacatttatccttcatttactgcgttttcatttgtgtctttgttcccttatttctctttataaactagaaactcttattgcacccttttgattattcgcttgtcaaaatttctagtaaggttattaaagcatacaaatgtttttttgcatgtgtcatgcattgaactcttaagcagtatagtcctttgcagtgctaagagagggtggaaatggcatgggtaaaagcaaggaaatgaattatgtgtaaaaggtagtagtttatattatgtatgaatgattatttctattaattagaagctcactaagttctcctctaaagagggtgtctcctacgagcatttggagtttattggagactccacctctcaatcacaccatcaccaacaacctttatcgcacttaccctgatctccaaccaggccaactctctcttctacgtgctgtcaacactagcactgtgatatgtttgcgttgttcagatagcaacagtatccttcattcacatgacgggatgaaaaatctcgaaaaaatgatgccgagaacactattgcttccttgatgcttgtggccttaaaggagcataatcatctgtgagtgagaatgacgtgttattaaggtgtctcccatctcctgttattattgggtattgtttaattaaagagtagtgcaactcggtatatcaaatcacacggcctatttgattactctagtcatttgaaattgtaagagctaggttgtcttatttgtaaaatgtatcaaagtaactaataaaagagatttcaaagttactttaatttgttgcaaataaatgaacatgcctagaccttgaaaacatacatttaacttattggagaggatctcttgatatcatgtaaagtatgttggcatgtaattgatatggagaaactctaattaaaataatttggatcgatgaagaaatttaagtattttgtaatatttgatttaattataatcaaaagataggctgaaagaagagataattaacataaatttggcgaaagaaaataatcagtgttataaaaattgatccggtcattgtctaagttgaggtagtaggtcaataggtcagtggtccaaccggtggacaagtaattggtccggtttgacccaatctatattaaaaaaattaaaattatattatatatgtatataactaacattatttgattaagaaaagttcattcataatttcatactcaaaaatccaaaataacaataagccaattcgaaatgcaaaataaaaattgtagaaaataataaacgggatacaagaagcaacatctagtcaagcccatctaaaaaaaactaatctctcaatatatatatatatatatatatatatatatataatcttctcattttggcttgctgcagcgcccccgtccaccaattttttcttcctgcttctcccttgcaccaaattcttctcttcgatcatctctacatttggaggttgttctctctctccctccacgacgatttcctccgattcgtcgccatcgacgttgctccgtccgaagtcattctcacttcctccatcaccactctgcaccgcgtcgcatccacacacgctagtaacaacggagatggcgtgccctgctgcagtgagcgtgagtgcctgaggccttgaactaagccgtgaacaaatgaagaatttaagatgaagaaaagttgaagcttttttttgggttttatgcgtctgaagcattttttcctggggcatcaaaacgacgccattttgtgcgtctgaagcttttttttttcttcaccaaccccgtctgggtcctaaaaaccggcaaggtttttggttcttcccaaaacggttttctctgggccacacgcatggccgattcattagccaactcagcccaattgatgctaggttcccgattcaaccgctccaactggccgattcgaaccaattttaatatcattgaaaataatgttagatttcataaattattatttaatcatatataagacaattttatcatacatgcatgtattcagggatttgtgcatattaaaacatcaaagtatctcccacacattttcctttgtcataataactataaaatcttgttaacacatgcgattaagtgttaagtagaccaaatgtacaaaaaacattgtattaaagtttttttcttatctcaaaaggggcaaccttgcatcaaagaactaatgagtacgaggcaagagaaatgactcacacatgcaagtaaatagccttggttcttgtttatattcttttcttttctaatcttaaaattaaagtgattcttgaagggcaggcaacgcattatttcatatatattagcacatatataacaacttattttgtttgaacttatagtggtcttataaatttagaattgttaaactgatactcttaattaaaaattaaaatcagataaaaatagcttaaaacatggtccatgaaagcacaacatgtagtaaaatatataacaactctcagactattcttggattttcaatcatacagagagaaaatgaccaaatattccaaactcaaactccttagttatttcataaacgcagccataggttcaatttcataatacaagaaaggtggtagtggtagttggttagaaaccatgaatgaggaagtgagaaacgttcttgcgctgatcaccttggagttggataatcttgccaagctccttgtcatgcacaacattgccattgcagcaaaactctttcttgaggtctttgaggatcttctcgtagctgaactctttcttcagcccttgcactgtggtcagactcttcttcccattcctctgttgtatgcggatatgcacatactcttttgccccgggggcatctgtttcttttgcctccgcaaatgggtcgaaagtgctcgtagggatgtgataaatacccacttcaaccatatatatatatatatatatatatatgaaattttcaagataattttttgaagtgattgatcatccacctttataataaggaaaaatatttttagaaaaatagaaagtgcttgtagggatgtgataaatacccacttcaaccatatatatatatatatatatgaaattttcaagataattttttgaagtgattgatcatctaccttcataataaggaaaaatatttttagaaaaataaatatactattttaagttttaatatatatatatatatatatatatatatataataaataggccagcctgatatacctaacatgttttttttttaagtttgagcctgacctttttatttaagcagacttttcaaaaagccttaacttaatttttatagtaaataagtcaggtcagcccttaaataggtcaagtcaaaggtccctgatagacggcctgactcactttcacctctatctccaaccaacccggccaggtctcttacctccaccattgcgtttggccacaatgcccctacccttgttcggcaagtggaatgctttatggcctatagtcatacttattttcactaatatatttttttactgcaatttcactaatattattaagactcagttctttttttaataataagtactaagataaaacacatttaaaatttacatattaataaaagatatattatgttaaaaaataaaacaataataatattattattaattccccgtgcattgcatggacttacatactagtaaaataaaaattagaacatcaaattaaaataattttggtattaattgtttctttttttccctaatcttcttcctaaattttggcaaaactaaatatatataaactaaaaaaataaatctacaattttttttctttacaataaattcttttaccaacataaaaatatgccaaaaatattttataaagtatattagtaatattaattttttataagaaaaagtctaatcacgtatacataatttaaattataaaaacgagcacataattcaaataaatcaattatttcttaaacacgttatgccttgaacaatatgtgatttcacattgagaaattttttcttaattttaaatttttatttataatttttgtttttaaaattattaatttttattataattatagtgtgattttaattttaaacttttgataattacagtaatatttatcaatcttaattaaaattgtattcttaaaattaaaattataaatccaataaaaacaaaatcttatgattgattaaaattaacgtgttttatttgttttgaataaagttattatttaaaataagatactctataactttacatcaccaaaacatattatttttgaaatttaaattatattttctaaattcgaattacaatcttgtaaatatttcaatttcaatgcaattcaacaaaaaattaggtagaagattataaaataagaaagaatataaatatattttttcttgataatttcgcatcatttactggtctttaagaagacttattctcatagtacctatatatactgcggatgatttggtaatattccagtttttccgctttgattttttaaattagtatatttgattagttgtaaaatttgttaggttagtgtatactcatatataggtacagaaagactagctagagaaatgaaacctctaatatgcaacgtagatacataagaatggcaaatgaggaaaagaattcgggaggagctgtaaagaaagaaggagattcggatgatatatttttgaggaagggtatccgtgcctgcttaaactggaacaacaaagaatcctcacttattttcattcctcgaggatgatgacactgagattttgaatagcatcctcagaagacaagacgaaagaaagagagaagaagaaggcacgtccacgaaaggtgcttgcaatagcagtgctaataataatgttggagattccaagaattacaaggccatgtgaagatattaaagattcaagaaatgaagggatgtgaggtgaagtttgttggaactagctctccctagatctctgaatatctacaagcacttcttcagtttatctttaattcaaaaaataaactctatgcatttgttgcataacaatgttatatatcctttagttgtttatgtaacaaattaaactgactcgtacttcacttatacatcaataaattcagatctttcttttcttctatatggtatcacaacctaattgcctgtgaatagggtaccactgtctgccctcctaaatccatcaccatcaatggttccgtaacgagaatccaaattattttttaatgttctattcagtaaattaatttttttatctgaatatgttattaatttcataaaatatatcttataaacaaacaacaccgtcaccactgcgttcgccacagtgcccctccccttgttcagcaattggaatgctttgtggatgctattgccgaagagaattaccctgtgccctgtgctgcatgccagattagtgaaggcatcaaaggtccttgcatacgtttatcaatccatcacgatgataatgaatgatatttatctcaaatacttgttagatttcgttgcaatcaattaatcatgatgataattaattataagttttattaatgattaataataaaggttttaaattacaattgcaatagtggaaaaattttaaattctttgtataattcaatatgatgaaagttgctttgtcatttgtgactatggtaggtaattgggcatgttttccagccgatggtgacactagatgatttggaccaaaaaaaaaacacttgatgattataatttagatagcagttattagaatgtggattttgacctaactcaatcccaaaagctagcttatagggtgagggattgttctccacttatatactctgacttggcactatctctagccgatgtgggactcaagcaggggtgtaatggatttaggataggctatgatatcgtattagaatgtgaattttgacctaactcaaccccaaaagctagctcatagggtaagggattgttctccacttatatactttgacttggcactatctctagtcgatgtgggacttggattatttccaataacagtacaacttggtatgtgtaatcacgaggcctatttgattactttgatcatttgttcgtgaaattgagagagctaggttgccttatttgtaaaatgtatcaatatatcaaaaaacaattaataaaagagatttcaaagttacttcaatttgttgcaaacaaatgaatctacctagaccttgaaaacatattaacttattggaaagcatcccctgatatgaagtaaaatatgtagacatgtaatccatatataaagaaactcaaataaaagttacatttataaataataacaatgtacgtaaattatcaattaaaaacaatttggatcaataaacaaatttatgtattttgtactgttcaatttaattatagtcaaacgctaggctgaaggaagagataattaacaggaactagaccaaaagataatgatataagaattaaaaaattattatttaatcataagacacatttatcaaacatatatgtattcacgaatttgtatatatttaaacatcaaagtatctcagcacacatttgtccttgtcataataactataaaatcttgttacacatgcaatatcaaatgttaagtggaccaaacaaaacattttattttttttcttatcttaaaaaagtcaactttgcttcaaagaactaatgcttacggggcaagaaaaatgtctcacatgcaagtaaatagccttggagttaacttaacattagtaatgaagatcaatttgagggatatttattttttatgattttgttacaaactaaattgataataaattataattttttttagtacgttgggtgtgtaaatttttttatgatcaaacattagtaatgaagatcaattcgagggatctaacttgacttttttatgattgcgtaaatttttcgttttacacaatgattagagattgttgggtgtgtgtagtttaaaatctattgctaagatgttattaatattattgaatgtattagtatcaagttagatttatttttgttttgtaaggattaatctaatggttatattttgatctgagtcttctattttgaataaaatattcttacattaaaaagataaagattaaattatattttggataaataattatttttgtttcatataatacataaattcatccataaatatcttaaatatgctcttttaatacgaaaatgactatttatccaaatattattaaaattcaattcaatctaatactttttttttcactttttattgtttactttttgcagtccttattaaattgattcagttatcaatatctcaattttttttcccgtccaaaaaaaaaaactgaattttttttattagacagagactatatctagactcatggatatatatatatatatatatatacacagaggtatagagagagagacagagagagtagagtaaggaaaacttctctaatctgcaacgttgatacataacaatggcaaatgaggaaaagaattcgggaggagctgtaaagaaagaaggagattcgcgcttaaactggaacaacaaaggaatcctcacttattttcattcctcgaggatgatgacactgagattttgaatagcatcctcagaagacaagacgaaagaaagagagaagaagaaagaaagagcgaagaagaaggcacgtccacgaaaggtgctggcagtagcagtgatgaattgccaagtccatttaaagaaaagattcaagaaatgaagggatgtgaggtgaagttgctgatacagaagaaactatgtgagtcagacttgaatccaaacctaaacgatgccagcttctctatgaaaattgccaacaattttctgacacaaaaggaggagtcctttctagaggaaaacgaaaggatttctggcatgcacgtcattgtgttggatccttctcttagagagtgcaacatgtgtttcaagaagggttcaagaagctgcttctacgacttgaccaatggatgggacaaaattgtgcttcagaatgatctcaaactgcatgatatgctgcaggtttggtccttcagagtctcctctcttctctggtttgcacttgtcaatctgtgaacgaagatgctgtacatgtgatgtgatggtctgttatttcaatcttgataattactgtaaaagatctatgaatgatcaccctcaaaatcctctatgtcaatttagaagggtctgaagatattattcacttccaacactttcaagaaataataaaataccaattttctttgcttgtacatttatccttcatttactgcgttttcatttgtgtctttgttcccttatttctctttataaactagaaactcttattgcacccttttgattattcgcttgtcaaaatttctagtaaggttattaaagcatacaaatgtttttttgcatgtgtcatgcattgaactcttaagcagtatagtcctttgcagtgctaagagagggtggaaatggcatgggtaaaagcaaggaaatgaattatgtgtaaaaggtagtagtttatattatgtatgaatgattatttctattaattagaagctcactaagttctcctctaaagagggtgtctcctacgagcatttggagtttattggagactccacctctcaatcacaccatcaccaacaacctttatcgcacttaccctgatctccaaccaggccaactctctcttctacgtgctgtcaacactagcactgtgatatgtttgcgttgttcagatagcaacagtatccttcattcacatgacgggatgaaaaatctcgaaaaaatgatgccgagaacactattgcttccttgatgcttgtggccttaaaggagcataatcatctgtgagtgagaatgacgtgttattaaggtgtctcccatctcctgttattattgggtattgtttaattaaagagtagtgcaactcggtatatcaaatcacacggcctatttgattactctagtcatttgaaattgtaagagctaggttgtcttatttgtaaaatgtatcaaagtaactaataaaagagatctcaaagttactttaatttgttgcaaataaatgaacatgcctagaccttgaaaacatacatttaacttattagagaggttctcttgatatcatgtaaaatatgttggcatgtaattgatatggagaaactctaattaaaataatttggattaatgaacaaatttaagtattttgtaatatgcgatttaattataatcaaaagataggttgaaagaagagataattaacataaactcggcaaaagaaaataatcaatgttataaaaatcggtctggttattgacccagttgaggtagtaggtcagtgatccaaccggtggaccagtaattggcctggtttgggccggtctatattaaaaaaattaaaattatattatatatatgtatataactaatattacttgattaagaaaagttcatccataatttcatactcaaaaatccaaaataacaataagctaattcgcaatgcaaaataaaaattgcataaaataataaacggggtacaagaagcaacatctagtcaagcccaactaaaaaaaactaaactctcaatatatatatatatatatatatataatcttctcttcgatcatctctacatttggaggttgttctctctctccctccacgacggtttcctcttattcgtcgccatcaacgttgctccgtccgaagtcattctcacttcctccatcgtcactctctacaccgtgttgcacccacacacgctagtaacgatggagatggcatgccctgctgcagtgagcgtgagtgcctgaggccctgagctaagccgtgaacaaatgaagaattgaagatgaagaaaagttgaagcttttttttgcgttttatgcgtctgaagcttttttttttcttcaccaactcggtttgggtcctaaaaatcggtcagattttctattcttcctaaaaccgtatggttttctttgggccatatgcatgaccggttcattagccaactcggcccgattgatactaggttcctagttcaaccggttcaaccggtcggttcgaaccaattttaataacattgaaaataatataaaatttcataaattattatttaatcatatataagacaattttatcatacatgcatgtattcacggatttgtgcatattaaaacatcaaagtatctcccacacattttcctttgtcataataactataaaatcttgttaacacatgcgatcaagtgttaagtagaccaaatgtacaaaaaacattgtattaaagtttttttcttatctcaaaaaaggcaaccttgcatcaaagaactaatgattacgaggcaagagaaatgtctcacacatgcaagtaaatagccttggttcttgtttatattcttttcttttctaatcttaaaattaaaagtgattcttgaagggcaggcaacgcattatttcatatatattagcacatatataacaacttattttgttcgaatttatagtggtcttataaatttagaattgttaaactgatactcttaaaaattaaaatcagataaaaatagcttaaaacatggtccatgaaagcacatgatgtagtaatatatataacaactctcagactattcttggattttcaatcatacagagagaaaatgaccaaatattccaaactcaaactccttagttatttcataaacgcagccataggtttaatttcataatacaagaaaggtggtagtggtagttggttagaaaccatgaatcttgatctgatccttcctaacaaggcgagcatgaatgaggaagtgagaaacgttcttgcgctgatcaccttggagttggataatcttgccaagctccttgtcatgcacaacattgccattgcagcaaaactctttcttgaggtctttgaggatcttctcgtagctgaactctttcttcagcccttgcactgtggtcagactcttcttcccattcctctgttgtatgcggatatgcacatactcttttgccccgggggcatctgtttcttttgcctccgcaaatgggtcgaaagtgctcgtagggatgtgataaatacccacttcaaccatatatatatatatgtacactaatcaccaccctagctgcaacaaaatgtacaaaccataagccacatgtgacatgttcatgcatgcatgccaatatcaacatatctaaccataacaaatctaaagcctcctattaagcatttctttccttcacgctgttttattgttttgtgtcagagatcatgaatgtctctcaattcattaagttagaaactaatctcactcgaggtgcgtgactgcttttgattcaaaaaaatttgcacaaagaagaaatcaaatacaaattttttcattaaatacatcttctctcatatatgaacgcaatggtgcattattacacagttatgtcaaccttatggattaaaatcaaaatctttccttcacatcttgcaagtacatataattcgtaaggaaagtagcaaaaaaaagagaataaaatgtctttcttggtaatagagacattaaacatggaactcaaactttcacaaacacaattttttagaccaagtaggaattaaaaatgagctaggaagatctaatgttgaaggagagacgaacctgtgagaaaggaggacttgtaaacaaagcaagagcgaattgagaagaataggtagtggtgggggtatatatagtagcggggtgtgcgtgacagaataagcaatttaatagcagtgaaattttttaggacaaattatttacaccatgcaattaaacatttgatagtataaagtaattttttaaatgtgtgtatatattatatattgatataagtttacagatgttaaatattgatttacatgtcttaaaataaataaaaaattcttacaatgtgacaatttctcacagattgcaatgggtctaatgatggttaatagcagaatataaggtgtttttgggtggatggagtatcctattctccatgggattgatatctggttgtaatttaaggcatagaaacgcaagataatttgtgtggtatatagtagttgtggtagagaacaagaacaaaggaaagaagaatctagactcaaattgctttggagattctgttccttatgcttgtctgagtgttacagatacgaattcttttaatttttatcacttctcaatttgcattattttataatatttgtctgtagaagatcaaaagaaagatcgggacaaaaaataattgtttcaaatccttttacaaaagagaaacaaaattattccagtccaattaatcatactgcaaaggaaattattgatcagtatgatatttctgggtttttactttttatttttacatgtgagtagacttccctgccttctaacttctttccaatgcattaagtaggtttatttatatctttctgcttttaaattcaccgtaagtatataatttaaatttgaaatattttttacaattttttataatattatcatctaatgatataatcatataaagtattaattaaactcttagatttcttaaatagtaattaaaaatttatgcagatcacagtgatactttctcccagtttaacaaaaggtttaaatatatttttatctataataaatatttaatttttacattttatttctaataaatttttattttactttaactctctaataaaataacaattttattttttatcattgacaagttctaataatttttttcatttatcaaatactcaaacaaaattattattttattagaaactcaacttaaaataaaaatttattaaagaataactacaaattttaagtatttattatggataaaacatatttaaacctttaacaaaattaacatatcagattttttaggaagatgttgattataagcctatacacatgaattgtttttatgaaatttaattgcaattttatttcttgaattttaatctctcaatttctctacaaattccagtattttttttataaaacatttccaacaaaataacattatatcttcttatagatcttcttacaaatcttccaagcacaacatatatacatatccaatttcccttttatttttactttttcttttattcaaagaaggctatgattaccttatttttcaccctaccactcttaagcaaaccaatactgaacagacacaaaatgattaatacaacagccttcatttttcattttttatcaattgcataaaaattacaccttgaaatatctggccaaattagataacatgttatcctcccctcaatattctactgtgccaacacaaaacagcaaccgacaagatcatcatgccaccaggagtgagcagttaaataatgggttgatttgaatgaagatagatcataagctattttggtacagtcatgaaactataaattcaaaacaccacgctgtcgttataaaaagaaagaaaaaaaaaaaaaatcaaacattacatgcaaggttaaatcatctttaaaacgaatacaactaatttaaatcacatttgtaatccatcttgttaagaaacaaaatcctcttctgatatttccaagtacatcgcttctcttttcatcataatcaaaattttctactgcctttgacaaaccaaagaggcttcaattcattttttaaacatattgaatctcccaataatcttgtatcttcacagaagctttagatctttttccatgtacaaacagagcattgacaaggttcatctcaataactaggtgaagaaaaccaagataaagaggaaaatgaacagcaccagcaaacccaatatcatcatgatctgtccctttgcactagccttcttcatgaccattgccacttttttctgatatcataaacaatgagacacacttcaactttcacattcaacattaaaaatttccctcattatattaaaaaaaaaaaaaaaaaaaaaaactacatatttcattgcccaaagactcctccctatgcaaaggtaaggaaaaaggatattgtacgcagtcttacccttgcatatgcaaagagactatttccggattcgaacccatgaccaacaagtcaccaaaacacaactttactgctgtgtcagggctcgccctccttatattattactaattaatcacagcaatcagccagatagatcatacattttaatgcaataatggaaactcgaagcagaaactcacttggacaaaatctaggcgattagatgtactgtccatctcattacccagctcatcaataatcttttcctgaaacatcaaggctttgacaattttagaatgagaaatttcccaaggaaacaaaatcagcatgagaacacagctactattgaagacactcaaaggaaacataagcaccaccagttttgcctagtttcatacttttgaaacacaagagtaataatagaaatccgcagccttaacccgcaaggggagaggctgtttccaggatttacaccagtaacatccaactcacaagacagcaacaaggctctcccactaagcaaaatagtaagatcacagaccaaaaacttgtcaaatgtcaaatctacctgcgcaaggagctcttcatgtatagtaagtccaacacctcctattctttgtacacttaaactaagctcatccaactcctcatcttgtctcctatcagcaccaatagataaaatataagacaaaaataaaatagaaaccagagattgattattttccaaaaacacttgagcactgtatttccagcctttatctgtgttaaggctacctgccacagtctttactctcccccattttctttttcttccacagaaaaaaaggggaatccatcattttagttaatatttcttatttaatagaaatagtataatccaaacaaaacttaaataattagcaaagatgatattaaaaaacagaaatttataatttgtaaagaagcacaagaaaaatatgttcatgtgtccacaatttcatacagaggagcccacttatgtctcagaaagcatagaggaggagtggacaatataattaaatcaacttaagaggtcaaactaattaccagaatattttccaccttgcatgcacaaaagtcacggtcaagtgtcaatttgtttaatatcaagaagatgtgcacaaagtcaagtaaaagcaggacaaaagacaaatatttaattcaatgccatataaagtgagagagagaaaatgggaggaaagaagtactttataagaagcatctgcctgtccgattctgactctatgaaatcatcattatcctgggcagcatattggttagatgtagtttgatgagaactaggaagcctcattaattccttgtgcatcccatttagacaagcattgtttaagccctttccagcttgcactgctttctttgctgtgctcacctaataatgtattacaatcattcacaagcaccatacagataaaaaaaaaaaaaaaaaacagagagagaagggaatctaataggtgctagcaataaaacaatgttgaatgaactatacattaggttgagaaaaaatttgactgtattctcctaactcttactcaagttcagcatgttatagatacctgggtgcgagcatcacgggtccacttcctccggttttcaacctccacttcatcaatgccataccaagaaggatctctagaggctacagaaattgctttgtccaattcatccaccttcctatcaaaaaaattatattttagcagtttgaataggttgtattgcagaaggaaaaaccatagcctaagatgtgtggcaaagagaggctagacaaaagatgtgctagtagagttagaagtaattttctatctgttttccactctctgatttaacaaccaacaaagagtgaaaatcaaaacatttccagctcactccatttttactccccttcatctttccttacagacccaaagggaaggggcaaaatcaaattaaaagaaaacaagagggaaagaagggagagggtattgatgatcttgctctccctttattgggtggctaaaaaatacaatggggagggaatggaatgatgaataaaaatacatgaatataatgcattcactatttattaatgagctcttatattaactaattaacattaaaatttaacaatgatatttagctgaaatttacaaagatttgcatcctcacaatgatcacagagtgaacgattcttctgcttttttatgataaaaaaataccatgtatttgacataaattgcagcatatgtcagaatcattttggacagttatgtgcacatcactctttttacttcctaccacaataaaatttccccaaggaaatacctttcccttcctctgacctagattgtaatataatccaaacatccctctaacgtgtacctaataatacacaaatcccatttcatacaaatgatactagtaccacgttggaagaatgaatgaaactcattgaaaacaaaaatttataggccaaccaacttgtcagtggttcaaaaaaatacgattggtatacctgccatgcaatgctttcacaactagcaagaacttcctttgatagattggatcgctcgccagcatcagcagtcttttcccattggtgaaacgtagattgcagcttatcaatcttaccagaaaatgaaaattaatcagccaataaattacacatcaaccccaaaaccaaaaatcatagtgttatcctccaattacagatcgcagttgggttctatccaaaatccaaattttgcattaaaaaatggcatactcagatcaattacataagatattaggagcaaaaatatcccaattaataatttcagctcaggaatcaggcttgagaagatgaatcacgtaaagtcacggatccactaataccagtaacagagaaatcatacagaaattctaagtgcatcgcatgatctatgaaaaaaagaatgtaatctttattatccaaattgaaccgaaaacgaaacctaggtgatttgggaaaagagaaaatacttacagattcttgaatttcttgcttgacaacgtagaatggatcttgagccgaaggcatcgtgtcttgctgtttcgaaatgcttcactttaagcacagaaaattggggaacagtgtcacgcttcctctcttccctttcatttctcagcttaatatttttttgccaacaatatatatatgttcgaaataaatacaattagttggactttatttaaagataaatgagttaaaggaaataagaagtcatttttctaaataataaaaatgcaaacaaattcgtgtttttttcttttctttataacgagtatttttggcttttcaaacaactttatgatgtttgttattaatttttttaagttaatattttttagttcatcagaaatattataaaacaaaattgcaagatttatattggggtgataacaattaaaaagtaatgattagtacgtgaaaggctgctataaaagcaagtgaaatatcagaatatttggtgataggcttagttttttatgattatcattaataatttgataataatattttatacagttaatgttttggagctaaagttaattaattaaatccatactcgtttatattaattactgtacgttattgcaacatgcctcggttttttatttattatttaaaataatagatcataaattctaacaataattaacctcttcatttttattaatttttttttaaatttttaatatatctttttagttttatgtctcacgctcaagttagtaaaaaataaaaacaatggattgactgtaatatgataattgagattaacagttttgtagtacagtgaagtgttaaataaaatagataaaatacatgaaaattaaacattgcataaacatattgatttgccattaagtacattcagatccatgcgtaaaaaaatctaaaatggaatttattgtgttccacacatttcacatggtgatggtgtgcctcagaaatccaaagagaaaaaacccattgcttaatcaagtttcggataatatagggaagaatgccaccatgatcaaggtatgccagctccaccagcaaattgagttgctaaataagtatatatcatagtgaagccactgtgtgcaagtgcgttgatcaatcttagatgataaaccatatatagaaggcacatgaatttagaaacttacatcaaggcaaagcttgcatttaaaagatttgccaatgtcagtggacacataaacatcttgaccaggttctgtgtcaccaacttttcctggaagatcaaagttgaatcactcatgacccgtcacttcttgtgttcatcatgtttgaagcagaggggtatgatccccatcccaactagattaccacggtgaattctctcaaagctcttagcaataactcctttcaccccctatgtgaacaagcaagtgaaaaaatatttgtaaaacaagaaagcagtccaataaatatactcaagtagtgagactatggagttttactgtcatctattacaaattatgatatatattaaatttgttaactttttcaatacctaccataaaattagtactaacatgatttttgattgattaattgataatataaaatttaagctggtaatgtataataattaaacttacaaatataacgaaataacattttgtcattggtgagctcacgagtagtaaaggacccttggcagcccaatcttgagagccaagataatggtgtccagaccagcacccttttacagttgtacctctataaagtatgcacaatatcatattatgtggtatttatttgcataggaaacttcaacaaatggacttcatacaaataaaaccaggaatgatgcattaactaggccaaacaatgctttgtccattgcgaaggggcattttggaatatagaagggtatacaaattcattagtcaaatcaaaggttccaaactaacatttctcgcattctcccaattagtatttctaaccaaattaacaaattaatatttgttgataaaaaaattatcttaaacatacacttggttttctacgcatgttttcaccaccggtttaattactcatctgtgggacaattcaatagtgaaactaatttgtgtactagttcggcccaaggcctaaaacgtctttttttttttaaatctggcccagaatatattaacaagcgcttctgcacaaccttcccactcattctatttttctatcaaattgcattattctatttcatgtattttttgtattttgtatgttacatgatatcaaattgcatttttctggaaattaatttcccgagtaatgattaaacagcataaaggaatattttgggtatagagaggactaatgataataaaaaaacaataattaaaataaaaggggagtgtacttaaaaaaaaatatgcatgatatagcattcgccaaagaaaaatcaaccctcccatcgaaaataaggcccaggcccagcatatgcacggctaagcagaaaggttcatgtgagaaatgtatttcattttaaaattgtaatattaattctaattatgacatggacttctgggatgtaacctgtcacctaattttatcttaaacaatgacaaaaaaatcatgctcgattcagaattgacaaatactttttgtttatgtagttgaaggaaattgacttttttttcattcttgttttatatgttccacatttgtaatttatgtaaaatacgtaaatagctcattgagcttttcccaaaatgtaatatacacagatagcaagggagagaggacacatatcaaatgagattcttttaatggagagaaattagaactataaatatagattattagatcatatttatatgtttaagattaaaaaaataattatgcattaacagtaaaataaaacttttacattattaatttattagaaattattattggtattatttttatacatattaaattacatttataatttatttaaccattgaatattttgattttgaccaaagatcacgtattggatattgtatattgactaaaaatatgactaaaataaaatatataagtaggagcaaattttacttttataagttagttttgtagatttaagttaaacacaaactcacgttttataaatggaataaaagtttatcctaataagtgttgttatgcttatcaaaccaccactattagatcattaattatcaaactactaataaatgttcagttttacaaattttatgttgagatgtttagtcctcgacatgagataatgtatatgtttgagaactcattatgatcaaattaaaatatttaatgggataagcaagttttgtgatgtcaatttattatattcatacccaaattttaagatcatgcaaatcaaattttaaataagtgaaatattttttattatgtaatgtcatagtcaatattttacttatatttttaaaaatatattatgcatttagttaaatttatctaatgatgtatctaataaatttaagattttataaaaaaataacttatttaattatatattataagcaattttaatttaacggttgaattgataaaatttaatgtgtaaaaattattgaatataacaacttgtaaaacaataatattaaaataacttgtagatttattgtccttttgcaaaaaaaaaaaaaaacaaaaaaattgcattaacttaatgaattttatgagaaaacaacctaagtgtatcaattttcatgtgattcacatttctgagattctaagttcaaaatttgcatgatttcacttaattatttaggttttaaaaatgtttgatggacaccataatgctatgcaacacctagtaattgaaagtaaaaggagaaaaaatatagatatggtagctagagtttatttggtaggaagagagagataaagaaaaataagcgatataaataaaaatgtttaaaataatgagtgtttatgtttcataaaagataaaagatgacaacacctaaagcaaaaaaaaaaaaaggctaagacttgcaagataaaccaacaacgaaaaatgtcacacttggtatatatcgtggtcagctacacatgatgccaccacgccaatcactacaatggtgcgcatgctgctgaattttgcgccaaagggaagccatgttagagctcgaccccagtggtttctacaaccccatgcctagcatttctaatacctaccattcttgcctattgaatttttttcttagttgctcatttgtgtctgttcttctctaatttttattgaataccaaaaactaaaatgtaattacttccttttttaatttctcaaacaaagatgtactcatacattctagtatatatattagttgtatgattgatacacttaattgtgtctttaacaccaataggtaacatattacatgttaatagttaattaacctcttatcatctcgcttaatgataattaaattccataataggtaacaaattatcatgttatctcatctaatctcgtcatatatatgaacactaagaaaaaggcctataaagaagacttaattagcatcatataccaagtacgccttaaacactaaccactacgtcttaactcttactcttattgacttaaagcattagaggcatttacagttgtgaccttcctctcatcatatacctaactaaaaagatcacttataaagggcaccaacccttcaacgtactttcaacctgaaggtttgtgagagatttcctagctttgagccaataaaaaacaaataggatagaacttaattagaaatactttttgtcgttgttctcctcattaaaattataattttacttttataacctctataattaaattcggcattaaagataaataatgattattaaatacacctctaatttcaattgtagaatataaaaagaaataaacttaaaatgaattgaagccaaagttatgtatgtctgtctcgatatttcacgtacattgcaggtagattaattgtggccatatatcagtaaatgtttgaactttgaaagcaataaatactcgaaacaaatctagcctcctaatgcacgtggtttggcctacattcccatatcgttaactatgaaaactttttggctgaacgtggggtttgtcttcacttgttactacttaatgaattatgacatacagctaccttgtcagctgcgtaaactacatttttggtgaacactggatgagattgattggcatatatggcattaattcttgagtgtaatatacgcatttcttcaccatcgtaaatatacttcagtgctcagatactagctctaaccccacacccacctaaaaagaaagaaagaaagaaattaaaacacgtacaaaactctcaatcaattaattaatatacgccaacagaaaaatatattacatagtataatacaaaattaaacatttgcacgtaatccaataatatccaacatcagtgatgcacattagacaaccaatgtaaatttgcaggaaattaagaaagtgaaggctaagtgagtgagatatattgccgtcagtttcaattacatttctgtgttgcatattcaaaccgctggatccaggttgaaatgagagtgggcaaatgcaccccctcattttaataaaatcattaatatttgtccaaaaatattatattttatacttcctaattttatattttgcattccgtaatttcatgtatttgaattttattattagtgcatatgtaagagtaagtaaatgtatcctcttattttaataaaatgcacatatttatcttgaaattttatattttgtaccttttatcttcgtgtttaaactcaactatctcatatgataatgataattatcaatttttattttttaaaataaattgtccccactaacccagaatcctagatgcgtcatgacactgttttcaattcccattaatacaacaacaaaaaaattgagctgagatcaaataattaagtgacatataacaattactaatatataaatttttaattatgactaaaatcagataactgtgctaagtgttgattatcgtactcaacaccagtgctgtcactttacagccgccacctcaatgctgtgcatggcttagcttttagcaagaagattctgctccaacggtggaaaatcttatatagcagattaattctttacataagattcccactaaatcctgggagtagttattctccctgacaaaatttcatatccatatatgttgaatggtggattggcaattggtgcatgtgggccacgttgatcttcttcaacatcagaaactttcacgaaccatttccctttggtttcaatttacacagcttttttcagaaaattaaagaaaaaaaagaattaaaaactttgacaaagcaaatgctgtgccagaacagagatcatttccgtgtactaattttctttctccttatagaattttaactttttcattttttatctactaatagttttacgttaccttcctttcaactttattttttatattaaattaacgtatttaaaagtcacattggaatatatatatatatatatatatataactatgtaatagacgtaaaatatttattagttttacttattaattactatatatttttcattgagaacctgactaattatttttaacaaatatctctttttaattacttttttattattcataagacataaatgtaagacccttacttaaggattaatatcaagtttcatcacaattaatatgttaatgttggtagattataattaatttgaattggatggatttatttaagctccttaacaattttttccacttgcaagactctatttgagatcttgttcacattacatatttcatatttgagtctttttattttaaaatgagatcagttttaagaaatgttttcctttttcattaatttacgtgactttatatttatattttcaaatactgttacttaaatttaatttaatttaaattttaagttttaatgcattgtaaattaaatatatattttttaaactaaaaggaattttaaaattatcatagtccctataaccgtaatttaaatttattttttaaatttaaagttatatataaaaaacatatttttttatatctttcttctaaattttaaaactactatatattttatttattttcataaaataaaataaaatatatattaataatattgaaattatttttaatttagaaatttcatttaaatttaaaatactcctataatatactaaaaatgtactaaaaaaatatatttgtaaccttatcaccctaatcacaaacatcagtatatcatatatatccttccctcttgatgatatggtaataaaaatgtatgctctaggatgaaaataagttaaagaaaaaacaaaaagaggaagacaagacaaaaaatggtcgtgtaattagggtcaaatgtgcatcataagtatttttttttacacaatttccaacacttgtattcatgtgtgttgttgaaacttcgactcttttgtctgtttcctcgagaatagcctgtctttatctgttcgccaccaattcaagggggctgtatataccatcgtttcttgtagtcttccttagaattttcaagcacatgttcttcaatacaacattttaacccgaagaggatctagaaaattattaaatgacacgaccacaatttaatcagagttaattttcaattaatgctccattaatagccaataatcaaatgtcactcgcgtttattaagttatatcattatcaaccttgatttgtgatgaatttggatatagggcgtggaactggtgtaaagcaaaaggattcgatttctccttgtatgtttggaaaatagaacccctgagtgccgttgtatgcatgagtgagcacgggtctacttggtttattgttttgggattgggtctactatggtgaatacatggctgcaatatttatgtgatttcttattggatcatgattgcagcatcacacttactatattgtgcttgtataacttttctggttgacacatcttatggcagcctgtttattaatattaaatactaaatttttttttataaaaaaataataatttatgattgaatgatagtataaaattatttaatgaaagaaatagtgaaggaaaaaattaatcatgagttgtgggcacttattgaaagggtaaatgttctttatgtcaagaggtgcgtgagcaatttgtataaatatggagaaaaaaaacatacaatttaaaatataaaaaaaaaagatgttgagaaaataattttttattagtttataatttattaacaaattttattgtagataacatgttttgcataataatataaattttcaataaaaaaatcaataaaagaaattatcaactttatttaatggtaatatactagtagttacaaatgaaacattaatttattataaataataatgaaaaaaaatactttttagtatactttttatgtatgaaattttaataatttttaaatatatttattaacatggaaattcatgtatcggggaaatatattgaaattattgcatgtaatatgtatttaagttaattatgtattacatttaattaataaagcatttaatattaatgtgaaattaattttaattatataatatgcttataaatttatcttattataactatcttatttttaagagtaaagtttgtaataactatcttttatgtaatattcttttaatatatttattatttattaacatgaaaaagtatatagcttagaaacatgtcataattaattaccatgtcatttaatagtttaatttaaattaattatatattacattgttaattttcatggaatatatattacattatttaataaacatagtatttaatattaatgtactgttaattatttatatgtgtatatatatatatatatatatatagagagagagagagagagagagagagagataagatagtgttaaatataaatagaaaataataacaatatattaatatcatattacaatattttcatgttttctcgtattattagtttaatatgtatttattgacttccatcttattgaatttaaatattttattttaatttattatgtttatagttaatttctcaaaatttatgaattttcttcaaaaaaatatatattatatattcatgaattttttgtattataagattaagcatttgattaccttttatttcaacaagtttatacattataatatgctccaaataataatgaaaatgataagtttcttgatgaaactatattttcaggtatgaaattcttaattttcaattatgataataattttataaaaatatttatcaatatgaaaatttattaatcaacataatatattataatagatgaatgtgtatgttatagtcaatgtattactgaagctaattatgcttgtatttaacaaatatagcatctaattttaatatcagttaagtttattaatataatatatttataaatttattttgttctaaaaaattaatgtatttagtatattttttagatattaattttaatataattaattttacaataagaaaaatttaatatattttttcagatataaattttttataattacttttatgataaaaaggtttgaatatatttattaatatgaaaattaattaatttgaaaaatgatttataattaattaatgcaaaaatgaatattattatgtatgttaattatgtattacatttaataattttagtatttaatataggtatgtatttaattttcatgatacaatatgcttataaatataaaaaatctaattcaattacttaagcaacataagtaaattattataaatttattagtacttaagtttgatttttatggataaaaatgtttataagttaatttattctatacttcaagcaaggaagatttgaggttagagtcttataaataaataaaaatatgatgaaaaacatatatttactatgatgatcaatgaataaagattaatgatcattgaaattgatgaatatttcacagcattactctggtaacaaaaaatatagtaataataataaaattattttctatacatatgttattattaccatttaggattcttatttaaaagcaacaaaatgattaatttttaacaagttaactaaaattctaaaaaagttccgctatttatttgagtttttatttttattttcaaggactaatattttttttacgacaaggacatgttataattcactataattttaggatcaaatgactattcctcgtataaatatagatgcattagagattcacaacatatactcaactcaaatttatttatttttggactgtatactaaactcaattaatcatcacttatatggaaaaggttgtgaatgagtaggtgaaaaaataaaaaataaaaacaataatcttggtggactcatggaaagaaaaaaaaattatataatcatctaataataattttatgataaatgtgataatttttaaaataattatcttaaactaatttaaataataatttataattaaatgatagtataaaatgaattaaattattcgtgcatcaacattaactctaattgataatatgagttattagtaataaatgcgatataaataaaaataaaaggtagtaattgaattatttaaggtttagacggtcagaactcagaacagaggtgttgaaaataaaaaagatagtgggcatgtacatgtactacgttgtaaaaactaaaaagttaatcctgtgaggtaccagagttaaatacgtggacacctatcattcagtgtctcattctttccccttcagaaagaacgaacttgctctctctttgctttgctgtttctcctataatctctctgcaaacttgttcaggtaagccataatattatggattttgactcaccatcatatatattcagtcaattcaagttcttatggtatcagaattaattcaagctgactcatctctcatttcacaactcattttttctttgcatattccagcaagaaaccactttagaatcaatataaagttgggttatttcaagcttctgattccaggacagcaacaacaacaacataaaggtggttccttttatttttcctcaataaaataccaaatatcttattgtatcaaatataatcaccccctgtgatttatagttttggttcttaatttctcccctcaatttccaaattctcctttttgtcttttgcttaaaccagtgaaaattctagttcaataatttgagataattttcttcacatttgtgttatgtgactatgcaggaagtgattgatttgtgatggaagataaatatagtctaggcaggcagcatagtgggatatggaagtccttgagagatggagattttgatgaagaagaagtttgggatgttttcaagaacagaagtagtgattatggtacttctggggttcgcaagttcaaagacaaagatcaatcctcttctgttcctgttcctgttcctgttcctgctaggcctagttcagccagaatgatcccaagatctagcaatagcagcagtgctagttcctccaatgaagataaggttcttcagcaatcagcacctgtcaacattcctgactggtcaaagatttatagcactaaaccccccaagaatagtgctaattcaaggtttgatggtgattatgatggtgatgatgatggtgttgctaactatggtgggagtagtgatgaggatggagaggaaaatgatgacagtgataagcttcctccacatgagtttattgccagaaggcttgcaaggagtcagatatcctcattttctgttttagaaggtgctgggagaaccctcaaaggtagggatcttagcaaagtgaggaatgctgtactctcaaaaactggtttccttgaatcactataaaggggtctcttgagtagtgatgtagctttatggtaaaacataatcaattaatttttcatggtgtagctaaaaacaacaaatagtttcttctactttttttatggtatcacctgattatatggggtagaattgattcttatgtgttatccaaacatgatagtagtagctcttttacatttgggatgtatagtggggtttgtagttagaggttatttaggaatggatgttgtgttcatatgcttggggtatataaaagaattgtttagccatttaccatgaaaacaatgaatcaaattggttgtggcaatcataactggtttcatctccttctgttataacaaattcatgggatcagatgtgtggttttgagcatccatacaaacttaatggtgaatcataattatagagccataaaacattttgaaggatacaagtgtttttctattttactttgacactgattttttgttttcttttcccctttgttttccctgtgcacaagtccaactgtccaagccttggtctacttccctattcctttattactctgtattgaataaagattctgtgaggtgtatccatccacctttggatgaggaaagagtgataagaagtgatgggatagaaaataagaaatgtgatgagcgaaaacaacagatacaattatacaaagaaaaagaaggtggagaaggagttgttagaaaacagaagtatataaaaattattactctctacatcattgatgcgtgaatcattttttttctatgtttttaatgctattttttccccatttggatgctattacctaccgtattttttacaagaaacaagtgataatatattttagactattacttttttgttgtttttagtaaaaaggatcggatgtagtatagtattaagtgaaatcaaagtccatgacaaaattgaataacccttacacgagtcggaaaataatattagttatacaacttccacaaagttgtaatatacatagactgtttgcaattttctgagtccaataaaccaagggtttgccatttcacttaaaagttgaaatgagttactcgtttgtgtaaagctatatgagttgagaatttctaataaatgtggtataaactcgattagcctcaaataattgtttgttggtccaatttagaactacaagcatttataaatctttaaaataacgagacttcagaactctgtaagaagggtctaaattattcaatcatgttgtggggtgggaaattgacatagacattcaccaacttcgtgtcatctaataattatagactctcaatgtatagtatctaatgacgtgtgataatgcgagaagggaaggggaaacagaaacacccagtatgtaggagtccctatcaattttcagctttgatctccataagattaatttaatacaacctacgtctagtgtacgctttttgtagctcatttcaattttaaacgagttttatttttttcccaatcaattttttacctttattgtctgtttcgaatatccatgccaaaaaattattaaatgcaaatacactgattaagacctctttttttaaaattttaaatcagaaatacataactgataaaaaaaaggagaaatacttaaagaaataataaagttatctattgtgcacaattctagtagcattatagtacagtcaacctatcaagtatcaacttctttcacgacagattccgtgtttaatttagttctccaaatataaactacatgccactgtaggaggaacaaaaagtcaaatattaccaacaggatgttttcaacatatttttgaataaatttgaacaattattttagtgagacccaatatatgaaattaattcaatgataaaaaaaattaaaatatgtaactaacatatattctttattattgtaaaacattcatgtgtcttttgaatcaatgcaacctcatgtgagtttttgtatttaaactaaaaggggaaaaaaacttcaaaccttgccgtgacatataattcaaactgttttgtttattataaacattatattggtttttaataataaaaaaagttttcatatattatattgttttaatgattgcaatgattaaatgtaaactaaatggtaggattatgagtattgttttgattgatcaatttgtttcttgctttccaaatataccagtaccacaacataagggatatagaatgtacttgattaatctttgacacgtaaaataaaaatagcatcgtatttgtgtcctaaatcaaactagttaggtctagggacagagtaatagagtatgctgatttgtctcttgcaccagatgggacaacatacatagtagatagacagccatgcttcatagcgaaaatgtttgttatgaccaaaaaagcattatggaagaccttccctagaaaatgtctaaccttatatggggtgccttaattatgaagaggagctcattgatcttctcacttcacatgatatttgtttagcaacatgatagcttctcttaactaaataatccaaacttagaatggggtcgaatggctctaattcatctactatcatttaatacctaccttattctcgtttattatggttcaatgaccctacttaacaaactccttgccttgaagaatactatgtcaaacccatgaaacaaaaataatgaatttgggtctctataagccggccaattctactttgctagattagtaataccaccaaaggacaatatttgccaactattctagagcaatcctcttcctacccttattcctccatcagaacctagctactgaggaaattagaaaggtacaaaaagactaaggaaagtgtataacaggtattgcataagagggaatccctttgaaagacgaccttgattagagtttcctcttctccctaatccactgaagagtgttatttctagatctgccccattctgttgggagaccaagaaaattaccaacaatttcccaagcttcttttcctaagacactaataatatatatctcttttagtagcagtagaatatatttgccaaagattaatccagactttgctaagttaatcctttgacccgggacaggttaaaaatatggacagcttctccagcacaagtaatcccaaagataagagcataatcttcaaatagaaggtacgtaggaaagagttgggctagaaggggttcacaataaatctccatatgtaagagctttcttaataatcaattcatccttaaaatattactctcttctaaatactctattttttttataaaaaaaaaaaaaaaaaaaactactcaagtgatcccaaaagtataaaaagttgtgttaagtagttctccaaatattaaaaaataccttcaaaatagttcttaaactttgttaaaaatacattaacttaaattaaaagttatggttattcaatactttaaggattatttaaatgtttttcttaatttatggattatttaagggagacagtaatactttaaaaacgaaattaatgatttattctttctaaaatatttgagagagagtatttgaggcaagaataataaatgggcttgaggcctctgtaggactttggaacacatttagactgtatatgttatactagacaataaggccataactaacttagcccatttatccccagacccatatgctattagagccttctccaagaaagtccattctaatttctcataggctttactcacgtcaagctttagggctattcttttgtgccttcgctgctcctcttcaaagcatgaaagtcctcatgtgctatgactattttgtcttgaattaatctggctcctacaaaggtactcagatatggagaaatcaattatgttatagaaccctaaacttaacagtaacacaataatctttacaataccttgaacattaaaattatggggactaatgtgtctaaagtgattacattcataagtctgtaatattaaccttccaaccatgccttactgtcacctttcaattggtgtaagcatacctatatctttggattgtagtagcatgaaagaaactcttgttattatctccccatttcagtcatttcaatctaaatctttacacacagtagtagttctacttccatagtcctcctttgattactctccatttcctcacaagttttattattatgggggtcatttcaaagaactgttagtctttgttagagtctagaaatctatagatttgcatttgaaaaaattgaagtctttatgtgccactgtagtaggtatttttgcagatttttttatttttcagttaactattccccagcatcttccttacccttcccttgtctctaccattttttcactaaggttccacaatgcttgtacttttcccataatgcctcgtatttaagttttggtaaaaatatactgttattatgtataaatactgtgaattcttgttttaatacttcaattttttattggttttaattcatataaatttttaaaaatttaaaatggtctctattatcatttattaatgacattggcataacatgtcataaaatagtcaccgaggtaacatgtcttcatacatgtcctgcaatcactaaataatgttagcgaccatttaaaaaatatataaaaatcaaatccaacaaaagttattttgaataactaaatctaaattttggtatattaactgagactatatatttaaattgtacttttttttatcacttctcatttttggaataaaatcaatgactaaggaaaagtgatcagaactcacacctaacgtagttgtcactatagttagagacctgtctagctttttctttgtagagaaaatatttctaggattattttgccttgtgtacttgtatcccttgggataggtttgtttgtatagaagagaaaagaatgaaagagaaatggaaaaaaaaatatttgaattaaaataaaaaataaatgtgagactcactattttttaattttttccccttatatagtaacctctcccccacacaatcaaaccatatcctttgaagttgtgtttgtcagcgacaagatagggacaatgagcaacgatggagtttttttaggtggttttatggagttgatttgtgagcaagatttaatttaattaattgggtgaaggtgcgttcctcctttgaaatttttgtccttggtaaggataaggtgtgtacatttatgtttgtgtttttttttttttttgtcttttttatcaacaaaattgattcatttgattgaaaaaaaaaaagaaacatatattaataaggatatatcaatatttttcatatgacaagtattactgtaatgttgtgttaaggatgattacattaaacctttatttataacaaataaatatgatcagtattgattatattggataaatctaataatgactaataaagactaaatcactaattattatctgatcacaaataacagaacaatatgtaatcttaaaactctcccttaagctcgagcttgttataaatgtggtcaatttgataaaaactaaaggcgattcaagtatgtgattgtatcggataaacatgattcgatggcagcaacaaaggctcgcaatgacgatgaagaccactgtgatgcttgttggagatgtgttacgtgtcgtgtgcgtgatcatcatgcaccaagaccctatgtggggggcatgttgtggtgttttgaattggctatgcacatggatggcatggtggtctttggctaggtcgctagaaagagacaaagtgcgatgatgcgatcgctggattgtgggtcaaccaaacaacgacaaaacagagtcaaacaacaacgaaatagggttgtcggaagaagatgagaatgatggcatggtcaccacgctggaaaaggtgtcacatggctatttggccaactattagttaggtgtgtagatacaatagccaaagcaaccaaacaaatggaaatcgagccaaatgaagtaaaaataggtttttctagaaaagaagaagcatgatggggaggtcatcggaggatgggtcattcaaaaaacaacatcacatgttgattcggtgcaggcgcgtgagtgtcacgcatcagagggtggcgacatatgacagtgagatttgcgatgttgggttcgttggagggagacactttcgatcgtctaggtacaccaacgaaaatgcaacatagtggcaatgtaatagtgctcacaatagtcatgatattattcaagcgacaaaggggctgcgattgagaaaagagggaaaaaaacaaaatggaactaaaattgtttggttcgagacaatggcaagaatgaccgcttagaaaagtcattaggaaaggagaaatggtcattggaagatgggcaatgagcagaagatccaccggggacttgacagtaagtcatcgatggagcacgattttcactattctttgtgaagaataatctaaatttttataccatacaacagtattttactataatgttatgtgttaaggacgacaacactaacgatttatttataatgaacaaatataatcaatattgattacatataatcaatctaataataagtaggggtggaaataggccaggccaggctttgataggcctgagcctggcccgcatcacaatcattaagcctaagcctggcttgttacctgttaaacataagttattaaggcttgagcctgacctgcataagggcctggcctggcctgaaagcctgtatacaaagcctgattaaataaaaataaataattaaaaataaaaataacataatagatatgtttatctcataaattataaaatttcaaattcttataagttatagatatgtttctcttaattattttatgaaattttcaaggtacttttttgaagtggttgatcatccaccttcataataagaaaaaatatttttagaaaaataaatatattattttaagttttaatgtgtatatgtatatgtgtatatatatatatatatatatatatatattaaataagccagcctgataggcctaataggctttttttaaagcttgagcctgacctttttatttaaacagacttttcaaaaagccttagcttggtctttatagtaaacaagccaggccaggccagaccaggccttaaataggccaggccaaagacccctgataagcagcctggcccacttccacccctaataataagtaatgaggactaaattactaattactatcttatcacaaataacaaaataatatgtaatcttaacattttattttcactcaatttatcatatatattttttaaaccaaacaacctaacaatactttgtttctctcctcacacaagcaaaaaagaacattagatctacctccatcatactatatgaagattggagtctcctccccactttctctatttctcatgttaaaagagaatggcattaaaatccctacataggaccaagctagcattttcagcatcaaattagatagacccagtactattccacaaaattctcctttgactaagtagggttgccataaataaaagcgcatgtattctacaaaatttctactcttattaaaaaaaaaaattaattattctgactactcttattaatttgaattagtacttgcatggatgaagttaagagaatgggtttcgacatcaactttgactttatacttacatggatgatgaatacatttttttgtataagggttggggtagctcttagtaccccttaatattaatacttttactgataaagaaaaacgtcgtctggttcaagttgagtttaggtaactaagtgtttcttcacgcttaacagaaataattaaaacacgcagttaatgggtttgtatttaattcactaaaaatagtattattacacacacacacatatatatatatatatatatggatcagtttgaattttcaactgcataagcatgaatctcaaatagcattaataaaaatagagtcctgctatttagtgcaaaaaaaaaaacgcacgaatactcgtgcatattttgattattttctattggttaattggaagttatgaatggaaaaaataaattagtgcatgtggttgatgtaaaaacacggtgaatatttggtatattatttttcgtactaaaaagtattatccttgaaaataaattttacacattaaaatataattttaccatcagatttgaaacgcatgatcgtgcaattattctttatgaactgcacagttgatcatgttccgtacatatgtaaatggataataacccacttgagattccagatagattccttaaaactggtgggtagaaattaataaagaaaactagaaataatatgaagaacatgaacatctgtgtccatgaaaaattgcaattccttgagtgcaagctctctctcctcttccacatgtttttccttgaaccccatttctagcattcccctcatcatccccacatgaaatccaaattttctcaacctttcaatttggtcctcactcccacctcccaacatggcaccacacgcagccccacatgcatgcaacccaccgtcccttttctccaatacaacgcgttgcatgctttccacgtgttgcacctcctcaccaccgtccgattcaccctcccacaacgtttttttcacgtactgcgcgtcttgcaaccccaccgaccccaccgcacgtgatatctcaattatcacacgcaggactcgctccgggctcgcacgtgctggcccgtcgggcctcgccagcaactcaaacccgaacggaaccatcccgtccccggtgaggagttctatgttggggccgtacatgggcctggacccaggcccgtcggttagaggaaggtgttcatgggcgtgtgcattggcgaggttgagtaacaaggccgatgccgcggccatggcttgttggcggtgaccgccgacaagctcgcaggtggcgaggcatagggccgggacggtggtccggggggcggcgaaggcgaggtggaacatgggctcgaagacctcgaggggttctttggcgggaatggtttgtttgaggtgggcttcaatgtcggcctgcaaggaggcccagtgggggtattgggaagtgggcattctgagcggtgcgggcttgacgggtaaggggacacgggcttggcttgatatgcgtgagaaatgaatcttgaagttggcgttgaggagaagggctccaaccatattgagagagaaactaggaaagtaacaaaagtgaggaagtggtgttgaaatgaatgaaggtatttatgggagaaagaggaagcgttgggagtgtgaatgaagtccaaggatggagggtgttatgttatgtactaggaatgcaatttgagaagcctagttgcttgatatgtagatgtgagaggtggacctgactgcattaatgggcacaagaactaggcttaaatagatagggaaaactaggctgctatttttattattttttttgtgaaattgagctagctgctaactttatgttggttaaagcaggtttaagttcatcaattagtttagttgagaaaaaactagaaagttatatttttttttataaaggaagaaaaagttagatataatttcttataaaatcaaattgaatcttatataattttttgatggattttaatgtgtcacataaaattaaaaaactttaagatttttttcatttttctattagtggtagatctcatcttagataacttttaatctgtcctatatctcatttttaaatattttatataaatatttattaaattgaatataattaattaagtaattaaatttaattaataaaatatgtaagaattttttataaatattaagaaatagaaaaataagcataaatttattttttatttatgactaaatgttaaaaaaaataatacataaatttgataataaaaaatataacacattaatgccaaaaaaaaattattattgttatgattgtaacattcttaaatatgctctatcaagtatgtttgaagttgttgatcaattatttttatacacataacgtgtcttgtttgcaagtatgtagtaaaatcaggagagtaccacgagatgttttaaaatttaaaatgtcattgtctatgtgataataatcaacatcaatattatcactaaatgtatctcgttcgtcatcgacaatcatgttatgtaatataatgcatgccaaaattatatttttcattatatccatgttccaggcatgcgatgaaccacatataatcacgaattgagattagaggacaccaaatactcgttccacatccttaagatctatccccaagatcttaagatttatcctcaagatccaatattaaagatattcttagatattaatattatctaatgttaattgagtcttaaaagtggttaacattatcacatggataattataaataattatattaatttactcttactcacttttgaattaaaaatgtatatagtttaccatatatataagtagaaattaagtaaaaaaatttccagatatacaataattcttattctattaaacaattaaaattaagaatttgaaactataaatttattacttgtaaaaaaaattatactattaatcattaagaaactatactacgtatgaatattaaaaaaattattgtaaaattaattaatatctttttatactattagtacataggctatttattttaaaattaaaatgaataaataatttgtaacatttatatttttttaaaatattttttcaaaatttcttttatttaatatttttattttaaacggatcaaaataggatttaatctttgtaacttcaaatcaaccattttttgttttcaaaatttgaaaaatatgcagaattagtccttttcctttaacaatgttaatgctgttaaggagctaaatttacatattttttaaatgttgaagatcaaaataatcaatttgaaaattaatacagaacctaaaactaattttaaataaaaatacaagaacgaaaaatagattttacccgcatttttatttaactcacccacgcaagtgggattggctcactacgttacttaaagtatagcacaccacacatataaaatggagtagttatgtgagttttgtccctagtcaatgcttaccaattatcaaacgttaaagtggagacatagacctgccacaaaaaaaaaaaaaaaaattatttacctaaatggcatgcgaccaaaaagttttaccatgcgatataattcgcttgtcagtccaacgaaatacgtgatagacacgtgacagtcagagagtaattcattggggagcccagtgaattaggtggacacttggcaaacagagagtaattcgctggggagatcaacgaattacgtagtaatagaaaaaaatctcaaaaatttcgaacggtcataaattttgatagaaatattcgatggaggcgtataatatgtcaaaatgctcgaaattcagaggcgagcattttgacgtattgtatacctccatcgaatatttctatcaaaagttaaatcatttgaaggacatattgcacttagacgcattttttgaaaaaaaatagtggaccaaaatccccttcccttcgcctctaaattttgagcgttttgacatatcatacgcctccatcggacatttctatcaaaagttatgaccgttcgaagtttttgagatttttccattgccaggtaattcgctgggctccccaatgaattacttcctgtctgccacgtgtctacctaattcgttgggctcgaattactccctgactgctagtgttcatcacgtatttcactgacaagtgaattataccacgtgacagttgataaaactttctgatcgtgtgacatttagataaataatattttttttgtccggacggtcgatgtctccgttaaagtgttacctaaagactaaaaagttccgtttaagtattagacacaaataattattttattttcaacgtgtttcgcgagtttgaagtgtaatctataaatttatttttcttacattaaaatttaacttttcgtaaaaggataaaatcatggcaacagaaaataaactttaaattacttaatcataaaagtttttatactgtgtcatgaattattggaagaaaaaacaaaactaaagcaagtccagtgaaatgaaactgagtttatctttcgagtcataaattcaaactctcacttgttatcttaaagtaaagtaaatgtaattttttctatgaatgctccttgggcctagaattttttgtttactgtgaattgaagtaatgtcgtcttcactgcaatcttttataagaaaataaaggaattatttcaaagttttatattgttaaacaaaaatacataaatatgtttatattacgttcgaatcagaatgaacctgattctttttaaaacggagagtttcatttttactaactggaatgggaattcatatgaaaagcataatctttttacttaaaatgagaatattttaagtgttacataaaaaagtaactaatctcttcacgaatgatctaaaaaatttatattatcatttatttacaatgtcgattatatgtattattatatgataatcttattaacttttagaaaacatatcgttgtaaaaaaaattaaaaacatatcaaccataattttgtaccctttttgaatttttaatatcatttatatgaattagcatacatatattaacataaataaaggattaataaaaaatgaaaaaatgattagaaacatcaaaatacacaaagaatcagtaatgtatatttttaaaaatatccaaaaaatatttatatttatgtataatagaaaaagaatactaattagggtattaattaataatagaaatattttatactaacattacataaaaattaaactctataaaatgacgctttattacacctaagtagactggacactggacagttgcaaatgcccagttgacaaaagcctaactaatttaattacgagttacgacaattctatgtttggttttgccgattgtaacaaaccaaacttacttttgaaatatttaatactttatgagtttaatctgtattatatatcatcactaatactactgtataattttgttcataacaaacaatgagaatttcttttaagagacacaatcaattgaacttattaatacatattagaagataacgaattagaaataagatctgtttagatacaaattataaatatttttttaaagaaaattattcaaaatatagaattttttctaataaaaaaactttaaaaaatatttctaactttatatttaaacagactataatcctcatctcaccttgatcaaattttttaacacaaacaatttttgtgaattctaagtttctaacccaattcaattaaaactagacaaatatatatggaatagacttggataaacttaatttgtttacatgatatattaatattattaacgttacatataattattttgtagaattaaagaagtatataattataattaaaatatatttataatattatttttaaaataaatattataaatataatattatatcaaacaaaatattatttatttgtcaaggagttgtattatcaatatataattattttttaaatattatactttaaaaaatgacattgtagtaggttgaaatgacctaaaatataagtctaaatccatccttaaagcaaatttatctaatttctttaacttgaactcgttaaaaaaatcctttaagaacagattaagttagtaagatgagttaggtcatgaacaccctatttcatattattccaaatactctgtttaaataagttgtctccaatgatgagttgacaaatacctataatttatatataaaaaatactaatacatttacataatatttttgcaatgaatcaaaatatttatattttaataatttcaaatcacccttttaaaaatctttatataattatatatatacttaatcattttaactgctagtctatttcaatataccatttttgtaatccttatttttaaattatattttaacagtttttttctaaaaaaacataacaatagttaaaaaaataactttatattataatttaattttttattataaatttaaacataaattatatatatttaaaaattataaattttaatataatatatttatatattgaaaagtattagtttgttataattttttattatataaaaataaaaatgtactgtataccatagtaaccatactacttatttttttaaaaaaatgataaattaaaattaatacagaaaataataaatttttccaaaggaggtaacaagtaaagtgagagtaagttgtgatacagtcagtaaaattatatcttgatgacttattgatcataaatttaaatctgaaaatagttgtttgtatatgaatggataaagtgacttacaattttcctcccccttccatgtgcgagagcctcctaagttttttttttggtcgcaagtaaagtcggcttcgtttatttcagaagacaagaaagagagagagattagaataagttggtacaccgtcaaatttggttcctcagaattgaggtattgtgtaagggcacgttctgttacatcgtttttcattttgattttggatggataaaggtaaaggtgccaaggcattagcgacctctttgcaaaacctcgatttgaatcctccatccaacgtcaaatccaagtcttccatttcactcacccaccctcaatttcccggtattttttaaacccctttttctctctttcaatctgcttttgtattttagagatggggtgttatgtttatgtttggtttttggtaaagctttcacctttcattgacccatgatcaattgcacttgctctgttttggggatcaattgaaattgaaagaccgttgacaaaacaatactaactctgaaatgcagtggttctttgtttctgtgataattttaggtagaaaacttcaaaaacaaacaaaaaacacttcaaccctcatttgggccttttactgcaattggtttcagttttgatcatattgcctggttttgtggcaagtgctcattgtttaatttggttttgcccttagactctgtgtttgtatgactagattatgctgacaattgaagctcagtttgagttttgcccctgaatagaatgactaaaatttgttttctttgaaggagacactaggtgggtgttagttgtgagaggttttggtagtttaaatgagatcttagggtttaaaccttggtggcacgatgcaccaattattttttcataagcatgtgccacatgataggcattaacaaattatttgagaaatttttgtgcaggattactgcctaagaaggcgaagcctccgagtttagtcagtctttgcgttggagttcttggaagacatttggaggatattgttgcagatttgagtgaaattgctatcaacttgccagctgatataaaggtaggttgctagagaatgattctgattcttcaaatcctttaataagtcatttatcctaatgctcatatttgtcaacaagtgaaattctaaatttatggtgttctcaatgtaaatgtgtgggaaaaaaagatttctccaggatttcccgctttctttgctaaagaaatatcctttgttgaggcacccggttaatattcttaagtggttgaaacttgtgttccgctcactgttctaaacacttctttgtttatcccttgttaaaaatctttgattataatgtatcttcccccaaaaaagaacaaaaagaatccttcatcctgcagcatgtattttatacatacatacaatacaaataaaaaagttagttatgcttaatgacagatagcagtggcagctattgctagaagaagaaaattgctgaatgatgatatcctgatcgcattagctgatacttcctgggaaatccttgatgtctctggctcagatgtctctgattttggcttgattaaagcagctgaagtatgtagattcattaaagctctagatataaggtatagaactataactttttttattaaaaaaatgaaacaattactatgctttaattgtaatgcaattgatctttgatgtctgagaaatgggaataaataagctgaaaaaacaagaattatcataatatttagtcttttcatgtatattcaaatttcagaagacatttcatgcaatatgctctagcttgtagtcttaactctgtagcttacttgatgctacaagagcatgtcatatgtcccattcaatggaccagctggtaggcacattttgagaaaatattttgctgtttgaactatatcatgagtttattagaagtgagtgatgaatgcagattgagttttatgcttagatcatcctcttccattgtaattttaattgtatttcatggttttacttctactggatgtggttattattaattttcttcacctagtttttggtccgtcaacaacttgccttgaggttagcatattgtaggattgatgtgatgctaacaatcatttttttagttttgtagtgtgtgtttttatattatacttctctctctttcagaatcacttgatatattgagactatttgcagccggtgcaccaaaattactgctaatggtatatccgagcttgtgaagcactgccacttattggagacattgagatgcgggtacatatcctgtgctatccactttaagttttatttctttgttaatgcaatttgttcattgtgttgttttagactgtattttgtctatcatttaagacataatctgaaaacttgtaattttgcttcaatgggccctttaggtaccatgttcttgttactattgtatctgtcatacttttgtcgttaggatctgtaaattgagttctcttgtaaagatgatcaaaacatatttacttactcatttatttataatgccaaaaactggctttgatataaaaaattgatgtatattctcacgaaggaaatgttatccgaaacttgggaagttgtaggtattgggaaatttattctatatttattctctcttttgttttaaaaatcaaattaaatcaaaaaggtagaaaattatgtaattttaaaattgtttagggtgcttttttttttttttttttttttttcatggtagtaatttcctctttattacacaatgatttttgtctaataaatcacattggatacaagactgtgttttgactaggattacatcattacaaaactcataacaggcaatgaaccataattaatattgcagaggatgtccaaggagtgacaacactgcacgaagatgcttgggtatatttaaaccaaggtttgatgattatgtggaggaggattcttgggaggagcttgatacaaaagaaattgctagtggggcacaatcactcaggtggcttgtgtgggtatgaacttgaaaacttctgtctaatttgtaattgaatgcaatttttgtccttactgaaatgcaaaaattcatgtatttccttcttagtttgatgtctttgtttttatgatagcattggttggtgtagagacacataggctgcacttcgtccagccaatgggggatggagtgagaattaggaaaaaataggcatgatggataacgatttttctttgattctcattgcatatagaaaatagaagttgctagtagtttaatattttttcatggccgacatttcttcaagaagtgattattttattttatttgcagccaaacattgataaaaattctttagaggacttttccactgagtgcccacgtgttgtagtaaatcctaagtcatcaccctttgggtttaagggaactgaggttcctcgggaagcattacaaaatatcatattggatgatgaagttgtcaaggacattgatcccagaacatggacaatgcatgggtttgcattgaagcccatctctccatcttcaagttccactgaattatcagtagctgaaaaattcagacttgcatttgtggaaagggacaaccgattagctccgaagcgagctaaaaatgcccggcaacatcagcgtcgtgcagtgagggaattgatgctgatgagcacaagagccaaggcaatggtcttagcctcacaagcaagcaagtcccttcatggccgaagctcatagaattctcacatgacatgcatttttcagttgctccaaaatgtactagtagtattaacttcttctgtatttagtaagaagttgttggtcatacagattttgaatctttagatatctcctttgacaagtcagaaagatcagggctttcaatttgtgccttgtttgaggtttctcacgaaatgaaaaattgttcagttgcccatgttatggaagaaatatgattgcctgttgctttgttccatttattgtggaaatgtaaaattaattttccaacatcattgctttggaagaagctcttgattcaaaaggataaaggattccttctgcatgatatttggccggaagttattgatgtggtactgctacctaacggtgcttctgctgagaggggccttgttttgtggaatggtgtgatgcatgtcaaaactgcttataatcgactgttatgagaatggttgatgagaaaaaggacagtgtctggcaatttataccctgttttgaaatatctcaaacggagaagacacaaattttctaaagcaaaaattttagctgcaactaaaattttgatttgagtcagatgcaaacaggctttaagctacaattattgtgcatgtttgaggcaaaagtcattttgccaacgcatcaggatccttgtttttgcatttattttgtttttatctgtgtgagttggagcttcttaaattcattttcaataaactttttgatttcttataattgattttagcttgtgtttggacacttttgtaatgcaaaagaacatgtcaatttgtttgaaaagctgttttgagtccttttttattctttgcattaatggtattatgtaacgattttttatcatcaattttttaatttaatttctttaaaaaagatttgtgatattttaaatagttaagatattttaaaaattgtcacaatttcacattcatatttttttttcttctttaaaatcatcaaaatatgtaaaaaatgtcagcaaatcatattactagtcaaatattttggcatttaaaattgtcataaattactttttataaaattaaaaaaataaattttgatgattaaaaattgtaacaaatgaaaccatgaaatgataaacaaggagggactaaacttaattttttgaaaatttgagggactaatgaaaacaaacaaaaattgaaggactaaaaaaatgtttatgcctaaaaaatataaattatttatattaaataatttgtattagaaaattaactatatatagaaaaaaatgaaaaactaaaatttaataacttctaatagtaaatactactagtagtattaaactttaatttataataaaattgtcaattttatattttcacaatcataacaatttgttgaaaaaacatctaaaaaaaggtttttgttctttgaaaataaattatatatacatagcaagataattatcttttataataaatgctaaaaattgtaattaaaattatttgtgattaattaataaattaaactcaatataattttgttgaaatgtttgagtggagtagtctgagttgggttgagctgctgccacaacacaatctcatacagcgcaggaatagaaggaaaagatagagaaatgtggaagagaaccttggtcggtgccgtgggtgctctccggcggccatattcgtcgggaggtggcggcatctcctccgccgtgaactcaatgctcctccgctctctaaaggatcactatcaagaagtcgccaaaatgaacatgccccctgtaagctctctctcactctgttatgtgctagggttttactttaggtttagacattgactaactcacgtgagagtggcacgtgcctagcagaaagtgagtcctccgtcgccgttcacgatcgtgaagggagctctggactcgcacggtccggttctgaagcgcagctacggcgacgaagaggtcagcatctatgtcatgcggttgttgacccccgaagacgaggattccgccatcgaccagctcttcatccacgtcgacgtctccaaacctcagcagaacgaatccttgattttcctctgcggtttgtacgaggatgctctggggattcactctgtttccatgaggcccaaggtccaggactccggctacctcctcatcccctcccaatacaccggccctgttttcgcgtcagttctgtgctctttgctctcaatttttctttgtttagggtttatgcttgtgtagtgtaggtctggagattggtaattaaattaagaagaagaaaaaaagtatgcactcatagtgtaaaatcatccaatcacacatcacggatagtaggtttgttgatttttacaaaactatatactgtccgtgcatcactgttaaattcttaaattaatgtcattgcaatctctagagtatatgaaagtataaggtggaaaaagatatatcaaacatggacggagattccacgtttactggtgatatgatttaagtggggaacaacacttaccgcatgagttagcttttgaagttctaagatggcattggaatcctagtggttgttgttggatttattagactactcgttatcaggtgttgttattggatcacctacaaatattcaatcttgcaagctataagttgtgtgtaatttccggggtaagcatgtctcttggagatttcacgttaactagtgatatatgaccaaaatagtatatatataggtggggaatcacttctctctaagttagattttgagattgaattaagttcaaaacccaaattcttagaaaaccgagttctatatttaggtataaaatgcagattttgggaagaagcatttaatttttttgtagatattaggaatttaggattaaaagaatggagatgaagtagaatgccctccactcagaactcttcaattgctgtaaggagtagtggtgtattggctctttttatttattatagtaataactattattgaaaatatctctaccgtgcgagttacttcatttcattttggaactcaattgtgagtgtttaattaaagtcaatgtcaatgtgatgtgattgattcattttgatgctctttccctgagaaaagataggctggacttagagaagaaactgcggaattgtgttttgcattttgggagaagaaaaaatttcttacttttggaagatacgaatacgcgtgttgtcctagaatgcccgttttgtgttttatcatatacctgttaaacttcgcttggaaattcttatgttttttgctgactgacttttctgtaaatgacagagaactagatgaaaagatgagagatgcgtttcacagttacattgaggagcgaggagtgaacgagagcctctttaaatttcttcaagcgtggctatatgtgaaggaacatcgaaatctgatgcggtggttcaaaaccatgggcttgttcattgatggaaagaagccagctacaggtgcataaccctccgagagatcaagttatgaattcaaaacttgcaagtttttcaatttaaaagtacctaaagtttcatagtttactattaggatatttattttggaggatcaacgcacccacataagtacataactttaaagcgagtggtaaattttatcaatttaactctttgtgatatgtgatgtgattatgacaaatatacacacaaaatttaagatgattttttttttttaagtatcaaaatgcaatgtttgatattacattttaaaatattttatgtgacatcaaataaccaaatagtacaccaaattaaaaataagccaactataattagtaatgttcatgacttatctgtctcactaactttacccgtagttattaatgattgaactttctgacataatttaatacacaatgttttacctaaattatatttttttacttatttatttttaaaatatattataaatatattttaattgtaattatatattttttatcaagtttgtgatttaattatatataatataaaaattgatgtcattgtcatgttaacaaatcagacaatttcaatcttattctatatattgttaggtctagattaggttggaacttaattcaaatgaaaaattctattaaaatttcatgttgggtagaatcaataacattcaggcactagttaaaagggattgggagattattattcagcacgttcattgtgcgggtaacctatgtgttattctactgataaaaaaaaaaaaaaaaaaaaaaaaccaatgtgttatttagttttctggccaagcaaggatctaatgaactttttatgaattttgtgtgtgtgcaatagcgacagaaaaaaaaaaatccaatagtgtgtttggatctgctcttaaaatccacattttcctacaaatccacgtcaaaatctttaaattgttggagaatctagtatttttagtataaggttacgcatgtttactggtgttaacacccaaccaaacatgcatgcagtagatctttctacatttattctaatatctcactattaggcccaggggtagccacagtgtggttttagatgattttttcatctaaaccagtcgattttgttttcatttagttttgcttaatttttattataactcgaaccaaatcagcttggatcaggttgccggttttaaaaaaaaaaaaaacagattgttcaaaaaaaattaaaagaaaaataatgtataagcaaattagtcttaatgtatgtggagtacaaatggagtttggcttttcaaatgccgaatttccaacgtgtatttttttctttaaaaaataaatacctaatttaattaggtttattttaataactaaatgtattataattaatttttttaaacaattgattagtttatgttttaaaatgtgttagaattgtgaatttaggttaaaatgatgcattattattagtataaaataaaagatcaaattgtatttttttagtgtacaatatttttttaaagtcataggtaaaatattatatagttgtcaatatgataaggacatttttttcttaatatgacttttcatttcaacggagtccacatcttttggatatttccgcatttttggaaaaaatgtactcatttaaaatttcaatatttcccaactctgttactactactagtactacttcttcaacaccatatatggtgcaacaagatgaggcagccatcaatgatcaagaacaacaatggcaatgtagacaacatcctcaactcgtatataacaagcttcctccacaatgtgaggcctgtcaccatttaggatattgattttgatatagtatttatttttaattctgttgtgggaccaatcaatattaatttttatattatttataaatatataattttaatcaagatattagtttttaaggctttctgaaatacaatttgatcattttttataattaaaatgcatgcttttaatacaaaatcttaaatcttaattctaacacattttaaacccctaaaataattgaaataaaaaaattaattataatatatttaattatttaaacaaattattttaatacaactaaattaaattaatgtttaaaatgaaataaaataaaagcatgttcatttgaaaagccgaactctattgataaagcatatacaattaagaagaattaaataagttgctaagtgatctaaaaatacaataattagttgctaagtgattctaaaaatacaataatttgttgctcagaggaactaaaaatagacatcaaaatgacaaaaaattaactccataaagactaatcatgataaacaaataactaaaaataagaaaaaattatatgaattaaaactcgaaatttgaaatactataacaccaaaatcttatttaacccgatttagaatgttgagatttcggtgaatcaaaagtcaatttgggtaccaaaaaattgccaattacctactctgaatattaataaaaaaaaagtattttggtacatattttgggatgggtgtttgggtaaataattttttatgattattaaaacataaaagtcacgcttcgtatttttttaatttttttttaactaattcaagatgttatatcttttctccattttaaagaatttgaataatttctaaaaatattttcaattgaagtttatgaatagttcctctaaatcaaaagaaatcattgggtaagtctattttatttagttatataatttaatttatatttatgttttacaaatttagtatttaaatatatcttggcaaagctagagcatatgtgagcattttgaataaatatttcaaaatttaaatctatgagcattttatattagtattttgattatttagagttacacacatgaatacttgttatttttgggtaaagaagacatgttcttgaatgcttatgcttaacattgccattgtgtataggtataaaatagcaacaaataaacaacgatatcattcaataataagtactacgaatcactgaactctttcagcattattctatgttttccaacaaaaacagagagaaaaaaagactcctaaagcaattgaggttttgaaaatggttgtgacatcataatgaatataaatcaaatgctttgtatcaattggaaatggtagttttaactaaaccaaggaacttgactttcccattgaaattctgctgtgctgctgctttgtgctggcaagacatcaaagtttggttcagcttcaattgttgacaagacattgaagtttgattcagcttttgcctgtgggacttgaagcttttgacaagtaatttgagtttggacatgggcaagtgcaatttctgtactgttgatttgttcatataatttagagataatcccagcacatccataaacagggtcttgagtcctacattgtgcttcaaaatacaaagaatttgcagcttgttcacgtaagtatgatggaatatgctgcaacatcaaaatatacaaaggttatttagtaacataatcttattgactttggatgacatattctaactttgatatattgataattttttccatattatagactaacataaacacattgatatcaaatattattatctatatttaaaacacctgaagcatttttccaacattgctgccaccatagattctgtgaacacaagcaaatctttcaggatcattggcaggaaaatatggaaagaaaatgcaatctgaagggcattttcttctttgattcttgcaagctgcacacctaccagacatcgtgatatcaaatatataaacaaaaagaaaggaaatcaaaggaaaatatttggcatccaagaaagatttcttctcttctatattttgctcgtgtgagagggtggatatcttacataagatttgatgttttagttgccaagagtatttgtatagtagtagagttattaacggctactttttcaatattgcaatgcaaaaggaaagtttttaacaaaagagaaaggaccatgaatcaagacacttagtctatatcacatgaaaattaaaggaaacaagtaatatataacacatatatagaagctaagtaatcaaatacttctaatgtttttgtaaaatatacaccaaataacaaattcgtgtcaaataattactttattattttattttattttcatctcgaatggaaaaataatttttgaataacattatatttttattttgtacttattatattttttaattttccattcaagtgaattaatttttttatccaaatatatctctttgttatttcatatagtgtagcatataaacaattatataaaatttataatatctttgctattaattgttaatttaagtatttgtaataaataaacttcaacttaatatattatatacataaaaaatacagtatgtaaaaattaatttgataaaattaattgttaacaagtaaaatttgaaataactttatgattatgttaatatgaattttaatgttggtatactaaaatatgttttatagaaaaaattaaaacataaggacatattaaatgcataaataatttgaaaataattcatcataattagttgctaagtgcttctaaaaatacaataattagttgctcagaggaactaaaaatagacatcaaaacggcaaaaatttaactccataactaaaaataaggaaaaattataggaattaaaactcgaaatttgaaattctataatgacaaaatcttatttaacccaatttagaatgttgagatttcggtgaatcaaaagtcaatttgggaacggaaaaaatagccaattacctagctactctgaataataataagaaagagtattttggtacatattttgggatgggtgtttgggtaaataattttttatgattattaaaacataaaagtcacgcttcgtattttattttttcaaactttttaactaattcaagatgttatatttttctccattttaaaagaatttgaataatttctaaaaaaaatcaattgaagtttatgaatagtttctctaaatcaaaagaaatcattgagtaagtctattttatttagttatataatttaatttatatttatgttttacaaatttagtatttaaatatcttggcaaagctagagcatatgtgagcattttgaataaatatttcaaaattgaaatctatgagcattttatattagtattttgattatttaaagagttacacacatgaatacttgttatttttgggtaaagaagacatgttcttgaatgcttatgcttaacattgcgattgtgtttaaggtataaaatagcaacaaataaacaacgatattattcaataataagtactacgtacgaatcactgaactctttcagcattattctatgttttccaacaaacacagaaagaaaaaaaagactcctaaagcaattgaggttttgaaaatggctgtgacatcaaagtaattaattaaaacgtttaaatatattttctaaattaatgttttaaattttttaagtaattaacaaaaattcttcacgctataaaagaaaagtctatttatctaaataattatataaaattactttaacaacaataaatactatactaatatttttatgaaatttaatttacttatatttattttccaattttcagatgttatattaacatgtaaatcaatatttaacatctgtaaaattatatcaatataatatatatatatatatatatacgtacatttataaaattactttatactatcaaatgtttaattgcatgctgtaaataatttgtcctaaaaaatttcactgctataaattgcttattctgttttgcacaccccgctactatatataccccaccactacctattcttctcaattcgctcttgctttgtttacaagtcctcctttctcacagattcgtctctccttcaacattagatcttcctagctcatgtttaattcctacttggtctaaaaaattgtgtttgtgaaagtttgagttccaagtttgatgtctctattacacaagaaaaacattttcttttcttttttttcctactttccctacgaattatatgtacttgcatgatgtaaaagaaagattttgttttaatccataaggttgatatagagatgtaatgcttcattgcgttcatatatggaaaaatgatgtatttagtgaaaaaattatattcgatgcaaaaaaaaaattgaatattttattcaacatgcatatatatctcaaacaacgttgtcactggttgaggttgttgctccaaatcatctggtgtcaccatcggctggaaaacatgcccaattacctaccatagtcacaaatgacaaagcaactttcatcatattgaattatacaaagaatttaaaaattttccactattgcaattaatcatgatgataattaattataagttttattaatgattaataataacggttttaaattgcaattgcaatcaattcattaggttagaaactaatctcactcgtgatgcatttatatatgaaaaaatgatgtatttagtggaaaaattgtattcgatgcaaaacaaaattgaattagtaaccattacacaccatgagtgagattagtttctaatctaatgaattgattgcaattgcaatttaaaacctttattattaatcattaataaaacttataattaattatcatcatgattagttgatagcaacgaaatctaacaagtatttgagataaatatgattcattatcatcgtgatggattgataaacgtatgcaaggacctttgatgccttcactaatctggcatgcaccacagggcacagggtaattgtcttcggcaatagcatccacaaagcattccaattgctgaacaaggggaggggcattgtggcgaacgcagtggcctggtgacggtgttgtttgtttataagatatattttatgaaattaataacatattcagataaaaaaatttaatttacttgaatagaacattaaaaaataatttggattctcagttacggagccattgatggtgatggatttaggagggcagacagtggtaccctatacacaggcaattaggttgtgataccatatagaagaaaagaaagatctgaatttattgatgtataagtgaagtacgagtcagtttaatttgttacataaacaactaaaggatatatataacattgttatgcaacagagttattgtttgaacttaaagacaaatgcatagagtttattttttggatcaaagataaactgaagtgcttgtagatattcagagatctagggagagctagttccaacaaacttcacctcacatcccttcatttcttgaatctttaatttcttcacatggccttgtaattcttggaatctccaacattattattagcactgctattgcaagcacctttggtggacgtgccttcttcttctctctttctttcttcttctctctttctttggtcttgtcttctgaggatgctattcaaaatctcagtgtcgtcatcctggaggaatgaaaataagtgaggattcttttgttgttccagtgtaagccaggcacggatacccttcctcaaaaatatatcaaccgaatcaccttctttctttacagctcctcccgaattcttttcctcatttgccattcttatgtatctacgttgcatattagagtttcatttctctactctctctgtacctatatatgagtatacacaaacctaacaaattttacaactaatcaaatatactaatttaaaaaatcaaagcggaaaaactggaatattaccaaatcatccgcagtatatatatattttgatgcgaaattgtcaaataaatttatatttatattttttcttttttttataatcttctacctaatttttttgctgaattgcagtaaaaaaaatattagtgaaaataagtatgcctatatgtcataaagcattccagttgtcaaacaaggggaggggcattctaggtgcgcagcaacatgagcccgtaggagagaaacttggcctggttggaaatcaaggtaagtgctgtaaaaatgactaatattaatacgatcttaaagatatacaatttattacttgttaacaattaattttatcaaattaaatttttacatatggtatttttaacccttaaaataggtccttttatttttaacttaaattagtttaaagttaatggggtttgcttatatagatccactaaaaatattagaagatgatacatgttactactaaaacactttttctgttgaaaaaaaaaaaaattcatgttttatttacaccaacataaattaattaaaggcgggatcatactaactttgaaattgagtcttcatttggagtggaagcttcaactctatatcctgatatgaaatacaccatgtagtttagtaccttaatcagtttaattgtctgggaaacagtcctagttgattttgttttcttggtggaatttgttttctgaataaatggaatcatgtaataacgtggacttgttgggttgtgctcctcaaaggaaccaatatagaaactatgtataagtattctatgataatttttgtacgtgcttgttgatgccatcaattttaattttattttccttatatgaattcagcgtgaaaaaataaatttggatatgtaataaaaaaaaattgaatgagaagggcaacatgttttgcttgatattctcacccagtaatagataatataaaatttatacgttgatatttggttttaccgtcaatagattaggcctttaccgtggtaaatgctttaccgaccttggaagcgcttgcctaaatccaattgccgccaaaactgaattttggtcggttttatcaagaaaagtttattttttactagttcaattcggttcagtttatcatcaattcggggttctttttttgcctagccctacttataggttattgtgttgttactcattttgacctgaagttaaggagatatcgatcttcatgatctgggagctagctaacagaaggaatggtttgaaaggtcttgaaactaatcaagttttgattgaatttgtcttgtatgtcgttggtctaattgttctcaagttaatgttgatcaaacttccgttaacacataatttcatgatatccttaaaatacatacatctgcaatgaattaagaaattatagcttgctaatatttccttacgtatttctcttcctatgtccaaattttattatctgcataatatgtatatgaccatgaaacctgcacagttagcaaacttggtctttatattatgaaaggctaataatcgaaagttagcaaatcacagataaaacaaatctgtcatacctctaaatgcagcacactttacaactctgaattcagcttctaacattatatttttaaccttttcaataatttattgactagaataagtataaagaacatgaataatttcaaaaattagaataaaactagtttaataactaaaactgaataacagaaacggtaaacaaaatataacctcccaaagtaactaaatctaatttgaagattatattttgaaatcatgatcctgccacggatgtattcacaacttgattcttaactagtgcaaaacagagcttagaggagagtctgaaggaccaaagatgcagcgtatcaccaagttttagatcattgtgacacacaatctcgttccatcccttggtcaagttgtagacgtagcttctctccatttcccacttcttgaagcacatgttgtactctctcaaagacggatccaacaccatcactggcatgccagaaagcctcctatttatacctcgacgctcgtttaaggaagactcctcaggtggtgtcagaaatctgttggcaatctttgaaggtgggatcgacaagcgagcttgctgtgggttcaagtctgttttgaaaagttccttctgcgtcacaaactgcacgtcacatccattcaactcttggatcttttcttgaaattcccttggcaatccatcaagttcatcaggtggcccttgctcataacccacatttctttcgtttctagcatcttccctttcttggaagcgatcttgttcttcttcatatgcagtaaataaggccgccactacatctagtaaatattcaaactttgatttgccatgttgtgaagaactagccccttcgcattcgcttttggctctctttgatgggttataattattttctaattctttttcgacttttctttcgagactgatctttgcacccatttcaggatgccgcaggtgcttttcttttgctgcaacaaagtcacgaaccaccgtcttcattggaatagaagctgatgaatcttctccatgcccgaattctttctttccacctgcagtacccattcccaagttgcacttttgcagattataagatttctttctttttctaatgatctcctattatcctccttcacctctctaatatatacacggatgtaaaaagataatcagcaccgtttgccactctaatgtagatataactactctgtaaccgaaagattgtgtaaaaaaacttaataaagataaatcataagataatatataattatgatagtaaaatctgatctaatataatattgtgtagataaggtcacaagataactaaattttattataatgtaatattgtcaagtaaaattatatttatattctttcttttttttataatcttctatctattttttttaattgcattgaaattgaaatatatacaagattgtaattcgaatttagaaaatataatttaaatttcaaaattatatgttttggtgatgtaaagttatagagtattttattttaaataataactttatttaaaacaaataaaacacgttaattttaatcaatcataagattttgttgttattggatttataattttaattttaagaatacaattttaattaagattgataaatattactgtaatattaatattcagagtatttaaaaagatagacatattcagtttgataaaatttatcaaaagtttaaaattaaaattataataacgattaataattttaaaaataaaaattataaataaaaatttaaaattaacaaaaaatttctcaatgtgaaattacatattgttcaaggcataacttgtttaagaaataattgatttatttaaattatgtgttcgtttttataatttaaattatgtatttttttataatattgtttttgtacgtgattagactttttcttagaaaaaaaatattattactaatatattttataaaatatttttggtatatttcaaacttcccgccacaagaatacagatataactgttgtgtaacataaagattgtgtatagaaaacgtaataaagatgaatgataagataattatgatagtaaaatctgatctaatataatattgtgtagataccctcctatagatattgataagataactaaatttactcaaatttaatattgtatattctttcttttattaaatgatgcgaaattatcaagtaaaattatatttatattctttctttttttataatcttctacctaattttttttaattgcattgaaattgaaatatatacaagattgtaatttgaatttagaaaatataatttaaatttcaaaataatttgttttggtgatgtaaagttatagagtattttattttaaataataacttcatttaaaacaaataaaacacgttaattttaatcgatcataagattttgttgttattggatttataattttaattttaagaatacaattttaattaagattgataaatattactgtaatattaatattcagagtatttaaaaagatagacatattcagtttgatacaatttatcaaaagtttaaaattaaaatcacactataattataaataaaattttaaaattaagaaaaaatttctcaaatttgaaattacatattgttcaaggcataacgtgtttaagaaataatttatttatttaaattatgccttcgcttttataatttaaattatgtatttttttataatattgtttgtatacgtgaatagactttttcttataaaaaattattattgctaatatactttataaaatatttctattgatatgattcattagattaagttgataagtaaatatttttattgtttgtaggactttattttcaattgtgagggatagtctgtagccttcacttttgtgacaaactgggactgcaacaatgctgcttcaatcttcaacagttctaccaagtgaagagttattgctttaagagactggttgaccatccaaatgttatcaatatcagttactggagttatggaccagaccaactccatatcgaaacccatgatatatgttcctgtttgccaaccggattcaatcaacaattctaaatgctaatatagattaaggattatatttgtcaaacaataactttaaataggctagttgatcatgttggtatatggtatctattattaacctctttttatttgatacacagtagaattgattgagttttaaattgattttagataaatttcagatattttttcatattaaataggagtttagaattgactgtgaatccaaaattgatggagttgaaacaacttttgatatcttttgcatgggatcaacaaattttatataaagttttattcctaatttataataaaaactttcaaatataaatcatagttttagaattatttttaaccaaaaatcaattttgtcaaaacaatttcactcaaaattaattttgtcaacgctcatctaaacatgcactaagatgtgggtacttggacattccaaaatttgttgtttggttgagaagaggggaagcataatagaaagagaaaaattgtgactcacatgcgaatctcgtacattctactttaattcaaatatctattttttttttccatcttctctgttttcatcctttcaaccaaagacagcataaaatctagactcatttgggtatgacttggtttagcaaaaataattattcattggattaaggaaccttggcttttttgtgttgaaacttctaatggactaaacttccgacattttcttgaaagtgggactcactggtttggtgatccaaaccagcacgtgctaccccatttaacgttacaaatttatgcttctctatcactttaatgactgatagttatattttcagcaagctacccaaatttgtgttggatgttttgagtgtattttggaagtttcaaaggaatcaagtctcacattggcacatttgatcagtttttcacatgcagggttattagagcactgctttcttgtttctatttctgcattttgtatttctggtgtcttctaggatgatatattcacatatagattgtctgaactctgagctgtttctgttagaattggcacacaacttgtcacttgtactattcacaaaggaacgctgttaatagtggtcactacattccccatatcaaggatgaaaaaacactgggcaatggtgggaatttgatgacaagcatgttactaacttgggtttgtcaatccaaactactttaaaattagattagatttaaacttaaactcaacacattaaatgttaaagtaaataactactgataagattagatcagaatttttctcttcaaaactaatttcaattcatctaatctgcaatcacccttacataacccggcatgactccacgtggttgtcatcagacatggcactaaccacaaaccgtaggccaaccaatatcgcttcaagaagaaaacgaagggctagaaatcataaccagcaacaaaaatatttcgccttttggcacccaataaatatttcatcagtgaaagtgcaattcttaagaaaggacaccggatgacgggatgaggatttcaatttaacaaactgtagaatctaacttggaaaaccaccttccctaggcaagtccatttattattagtgtgcctaataaattacatgtggactcaataataaacttcaaagtgaaaaggaaaccaaaaagagaaataagagttgaccacaagtcacgcggagcatgtaactcaaaacaaatctaaactacaagctttacatgtctaagatgaatattaactcttggaagcctttatctgaagcaagcacccatcttggctgcaggacacacaatctagagacatcagaatagcttgccttgttgttgggttccactcctcatcatggtacaaaattcttcatagttgattctaccatcctgagaaaccacaaaattgagtgtcaactatggatagaactagagtacaaaattgtagtaagcaaaaagaaaaacaggcttacattatctgcgtcaacttcggatataatttccctgattgtggcctcgtcacccataccatactccttcatggctgtttccagttcatctcttgtgatatacctgtgatggaatcaaacaaaaatcagggtgcatgtgtcattactctttaaattctaaatagagctattcattatttaatgattctgtaatgtatgtgcttttgggtgtaggaagaaataggatttatggtatatgatcttgttaaatacttattaaaaaaactgaaaacataatccgatagtcaaaagattaatatggaaggcatggacttcaaaattgaggttgagaatgcatagtaggaaaaaagaattacttccataatgtgacagattgaggaagaaatgttaattcacagtagatggatttacccgctgtcgtctttgtcaaaatattggaaggccttgtaaagatgctcatctctttctaacctgtgtctatgcattgtagcagtgatgaattctatgtagtcaattgtgccatttccatctacatcagcctaaatttaagcaaaggagtgtaagcttgaaagaatatagaaaaagcaaaggagggcaaatcttgtgaattcaacaatagcttacggcatccataagctgtcgcacttcagcttcagtaagctttgagcctagtctttgcaatcctgccctcagttcctcataggtgattgtaccactattgtcagtatcaatatttgtgaacattgcctttaaaccttggatctcttcttcagaaagattttcagcaatgacctaaaacgattatttaagtccactcagtttatttttgaattggtagagatatgtacccctacaccctatagttacacacagtcgagcaatttaaagtcattatgagaacactggaaaaaaaattatgtctctcaatgtttaattatgccatcaaatacaataagcataaaagagcattgtggtcacttcatgcagcttgtggcttgactaaccttgagggctagtttttttagtttattcattgctctgaattgcttcattctggaaagcactgcactgtctattggcttgtcagaagcatttccaccttctttaagccatgggtgctctaaatatttaaacaatacaaggaatcaattagtaaagaaaatataattcatgaaccaaaaaattcttaaggatgctgcaatcaagctatcagtcagcagtaatattaacgggaaacagttttgagtcactgcatcaagacaaagacacacactgttactagcttccctcgtgttcaataatgtttcattttctatcacatacagaatgtcctataactaaacaactgacatgtttaaaggatagataatagaagaaacagtatatttgtgaaaatattgtctctgaaaagtccctagtctcagcaactaacatgttcaaatgcatcattggttgtcgttgtcacacctatatgggtatagaataatctatacagatggaaagatcttggcacgtataagtttttaagccctaaattcagtttttatatgcaacattactattagtaataactatatccactagccttgttatgtgttagatagaagtgaagggaaaattagttgggaactagagtaattagttggaggggatcaattagataaatatggtgaagggtgaaactgtgaaaggattcattcagagaattaacaagcttgtaagaaagggggaatccttagaggagaatccatgtttcggttcgttttcattcaataaataaaatcaatctttgggttgctaacagaactggaatatatctaagcccctttagtgatctatcttctcaacctcacccaagtacacacataaaaggatcaagtaggaaagaaattcaaactatcaatgaggagaaaacacaataaaagtctcctacctagaacctgagcagcagtaatgcgtttctttggatcctttataagcattttgcgaacaaggtctttagcactgtttgatatgcttggccatggattactttcaaaatcaatatgaccttgcaatatggcatcaaatattcccttttccgtctctacatcacatattttattaaaaaatagtcaactgtaaaacagggggaggctagcctctaatacaaggaaattatcctattatcaacatatcaaactcagagtttacctgcccaaaatggtggtacgccgctaagtaagatatacaatataactccggcactccatatatctgcttccttcccatagctacgacgtagaacttctggagcaacatagtaagcactgccaactatatctcgatacacctttcctgtgaagaataaagaattaatagaaaaaacttagtatgttttatacaagtgagatgatgtataaaataagtaagcgaggtttatcaaccgtcaatttcgtaaacttaatttactttaaattaacagtagataaaccctttctaacaagccatcactttacaatttccatctccatacttgcaaaaaaattaattcataaatcatggcacaaattgagtggcaaagatgtccatctactgaaatgtgataaagtgcatgcatagatatggagaaaaaagaaaaaggagataaagctttagaaaaattagttggcagaagtttattcaaataaacatcttgagggagaaaaaaaatatcccatgaaacaaattaaaagctactcaaactttgcaagtcttgacaatcaggccattgatgtcaagcattggcaatgcactattagaacttaatagaaaaatcattttcaatcttacatgccttttgcatccaattcccccccccccccctccccttacacaaacacacacaaaaaaaacaaaaaaaaaaaatggatggaaattatacaaaattttcctcaaaaactttagaagattattcacaactatgctacagttcacatacttacctttcaggaatccccacaactattaaaaattcataagaaaagaccaatgaatggataacaaaatataccttcttcaatgaagactgacaagccaaaatctgtggccttgagatgtcccttgtcatccttactggatagcaagaaattctctggcttgagatccctatgaatgacacccataaaatggcaggtgttaacaaccttaacaatctgtctacatattgaagcagcagccctttcactgtagtggcccttggcaataatcctgtcaaaaagttcacctccagcacacagctccataaccacatgaactgattgtttatcctcaaaagcacctttgaactccacaatgttggactgtccactcaaatgctgcatgatttgaatctccctcttcatgtcctccttgtcagctctgctcacaagcttcctccttgaaatggacttgcaggcatactgcaggccagttgaattctcagtgcagagataagtaaccccaaattggcctctccccaattccttcccaagtgtgaagtgctgctttacatcctcaaatggcttcccagtgattgtgtcatgcttgtgaacatgttttgggcttggtggaggcctccagggtgcctgaggaggagcatgtttctcatgtaattggtatggttggtgagaagggggtttggtttgggtggcaaagggttcatggctcttgtgattgttgtacacaccagcacccccagcaccggcaacatgtctgtaaccaatgtgttcttctggctctgacccttttttactcagacaacaacccatggttctgacaccaaaagggaagagattttttaagttttatcaggtaccaccacacaaccaactacttgaaagtgtgaagattcagtcaaagaatgaaaaagggaatgaacccagaagagaattcaagaaagaatatccattgaagtgtgaagagagagaaaagggggggaggggggaggagaagacaaaggttgatgcagaatggatcagaatatgtggttttttaaaggaggagaggaaagtagaaagaaagagtctcaacaaaaaggataaagatagaaccgagtcaactgtgggattcggattttaacgagttaactaaaaaagggttgaaactattttacgaccaaaacaaggttagagccttggagggagtccatataatagaagaaaaacttccttgattcattctttcttatgattcaaggaccgaatcagagatgcgtatccaacaccacatttttctcctgattcgttcaccacatgctgccacctaatttttgttaatgagtaaccaaaaaaaaattatttagtctaaggtttttgtttttgtattttttatgttcttcaaggactaaggtgatgctgctctcatgttcgtatttggatagacttttgcatttccaataagcgtaatgaaaaaatttatctgagatagtataagcttcgcacttaagatcattgtgtcaagagaaaagaaccattgataaaagaatgttgaaaaatatatttgtaaattaaccaaatcattaaatagctgtggaggtcagaataaataaaaaaacgctatggagatactatgtgtgtatcttagtatgtgcacaattctatggattcaaaatcaaattttataattttcataaatagcattatagattccttatagatcataaaaatatataatcataaataatattgctcatatctctttattttggcaattacattattggaaatcattaattattaatttaatacaatattatattttcatgtgcgtctattatataaaggttgacttaaatgatccttaatttaacaaaaaaggaaatgtgtgcaatacacttaattcttttgaagttgaaaatcttctaaaattaaattaacatacatctttaagtagaaatcaacaattcctcaaattgaatcctgcgtaagaactcaggatcagcatgccactctggggtcttcaatgaaaaaattatgcttccttcgataaagtgtgagacattattctaataatttagacgttacatttatttgtaagtgttttattttattttccaataaaaataattctcatgaagtcatactaaaaaattgttttggttgtagagcattttctcaatattaaaaaaatgacaagtgtgccgagaaattattattattgttataaaatgtgtttttggttcctgaaattttagtcaaaattaaccttaaatcattttaaaattgtgattttcatctttaaatatttgatcaaaattagatttagttttttttttttttaaaaaaaggtttttaatgtcacatggcaaacatatgatatccatatgatcgttattagtcatgccaacaaaatattaataaagttaggatgagagactgaattcacctattttaaaaaaattcaagaaataaaaccaaattcaatgaatttttggagagcctaaattatatatttaactcttttattttcatttaaattgtcaatcaattaaaacaacataattaacaagtaataagaaaacaaaacaaaaaccataaaggatagaaacacttctcctaactttaggtttaaatagagtttatctcgttagttttcatacgtttaggttcatcttccatgtttgtctcccatgtttgtacggaccttttgtcatcttttaatacattttaaggctagctggtttagttagattattaaggtgtcaacataattgaaatgtcaatatctagttatagttagtctctattttacctcaaaaaataaaacaaaaactagcattttagatgaaatattatacaagctaaatttgtattagataaatatttattcttataaaattataatttataataaaaaaatatttataatttattaagtgtattataactaaattataataaataaatactttttaatatataattacattttaaaattatattgaataatttaaattatctttgaaaaacatattaaaatccacacaactcccccttctaattagagcatatttaatgtacatattttgatgggtatcttatattctaagatacagtatcaataagaggtaattttttctgtttgaaataagaagaaaacaaagaaaaaaaacaagtgtgaatcttgcttcaatttttttccctcccataagaggaagtgtgatggaagaatagggaaaaaaattcaaaaaataatccttgcaatgcattttatttttataatatttatgaagaaaaaatatatttattttttaaaaaaatcaaataaaattaatgaattccttttcttttcttttttattcatttttttctcttgttttttctccttcgccgaatatgctaatcacaaataaaagaaatctactcgtaactaaaagagaaaaataatgtgcttgatgacggtgatatgatggaaattaattggaaaaatatgatcatcaaatgaaataggacacatgtgaaatgtaaatcatgaaacgtggacacgagacaatatataattattatcatttgcgtagtagttaactctgaagcaagaaaacgtgtacacgagcaagcaactcattcacggtttttatttcattcaaatcatacactttctggtcaaattctcagacccccaacagattctatgtttcaattaaaataattctcgcacttttgctttattagaaacactgagtaaagaaattaacgtgagagaacacaatctaagcgtttcctaactttccttgcactttatttaatagaagtgaaataggtaaaaaaaaaaaaatgtcaagagagatgaaattagatggaaaattaaaaaaagttgaattatttgattaagtttaattaataaggagagaaattaaaaaattgtaggcgcgccacactaaaaaatattttcatgctaaaatgataagaaatggaaggaaaatatacacaatacgcgttgctttaaggaacacttcaaataaaatcctactttataatttttaaactataaaatgtttttttcatccacagtaatagaaggtgatattaaaagatttatcataactcataaatcttactcaaataattgaactagactttcttaataaatgattttatcaagttttagtttttatgtactaaattaattaaatcatagctctgaataacaatttattgggactttaaatctaactactacattgaccgtgttaacttgatatttcttaattttgaagtaattattactttaacaggaaaaaaaaaattatttgtcagtatacaacattatgaaaatgtttagttttcaagtttttctttgtaaataatacttagggtatttttttatggaattatcttgtatttttagaaattacgttcccataaatttgtagtgaggaatgttattcctaagcatatataaaaatatgtttggttaacttttaacatttctaataatatttaaggcaatttttgtttttcttctaaacgaatatgatatcgagattttttattggagcgtgattggtttttttcagattaataaatgataaataaaagtcaatttggagctttctcatcccattagaatgggaagaaaagttgtagacataggaatgtaactttcttgagaaaaaaaagaagctacctttgtagtttattctttagcttgtaattcaatagagaatctcaaacactattattttattttgtgcccagttttacagtttttgggaataaaagatattcatgaatattttctgataatttcttattaaatatgggaataaacattctcacctttatatttatgaaaatgtaagataattttgtaaaacaaatgttattctctattaattctttatctcctttttgtaggattaatttttgtattgataattgtaaattaagttatttgttagatgaataattattgaggtaaaagagaaatacacacaaagaactataattgtccgatgctaaagatgatgatacacaaaccatggacctaatcacataaagccttaaaaaatggagcacgtttttttggatactaaagatgaatttactttcacatatctttttgggtaaagcaaatgggtatgccctttcttccccctcccggcctcctcatttttgggttaattatttacaaagtggttttgcttttcttaattcttctgtgacaataataaagctatgtttaagtttttgaagctacaaaagaacttagctttcaagtcacaattaactttcctagcccgcttggctagttgagttgctaaagcaacctttattttgtggagatgccgattttattttgttgtgttataattttggttggatgaatacttgagtgtcgttatgtacatgtttagggtttctttaattaaggggaaaaaacaaaatcttaattagtattattttttaaatcgtcaaaattataaataaaaaaaatcttaacaaaaacatacttatgttaattactatgtttataaaaggcaagcaaaagaccaaggctgcaatgtctttgtagagctatggcccatgaatctaccctatgtaatgggagcaaatttgtggctgaagtgagtctgttaaaagtgatacaaattaagggacagtgatatttcctcccttgtcttatacaaatctttttgctaactaacatgccataagttgactatttagcatttcacatgctattctattttgataacttccaagaaaattgccattattgattgaaggttagtgtttattttttaacaattattaattgttattttgttaattttattattattgagagaaatttgaatccataattattttttctctctatcattattttgtactgccagaagtaattattttattaaaaataacaatataaattaaccaaatcatgagaaaaattatcataatatatttattgggtgtatacatctagtgaaagataaatgtataaaataaaaatctagtgaaagataaaaaaaaaatacgtaaagagaagtaaaaattataaggagtgatgtaatgttatataagaaaaagagaggtacggtagagaaataaagaaaaaataaattaaaaaaagtgtaaaattagcaatattgttaaaaatcaaaatcataatcaacaatgagaaatcacacttttgttttttggaatctttcatttcactttaaaatatcttttcagctaagtgctaatagctaatggctaataacctaatacaaacgtgtaacacatttacccaaaaaacatgtggcacttcacctgatcttgagaaattgttaggagtttgtaaaagtggttattattttattagtttgtaatatttgttgaaatgttattttatgaacgtttaagctcataggtttctaattctttgaagaaaaaaaaaaagttattttcatttttatctttattatattatgataactcttctaatattgacaaaatgttgatactttctcttattctcattaaatatcatttctttaaaagataaaattattaaaattataatataacattatttatattagttcattacattaaatacaaaaaaataaaataaaaaataagaataaaattaacgtactagttatgatgtggtgcgaatatatatatcatggggctacgtgtgcaagagaagataaattaaacggcatagtaagattaattgaagaaattaaaaagaataaaacaacaattttattcctacattattattgtttctgctaaatagttcctaaagtaaagaaattatataactaatccctcaggtattaaaaattgtattacataattcccaattataaaaaatatttcaaattaattcttggacgttagtaaaacatgttaatatatggaataaatttatgctaattcaatattctaaggattatttatataatttcattagttcaaggactatttagaagagagaatgatacttgaaagactgaattataggtttactgaaataaaagaagaagaaaaacacaacgaaacataaccaataacaaaaatgcttcttctactaaacaggcaggtatatatattgaactttttgattgggccaatagaacttaaaatttcagttgtgaacccaaaaaaggcccaaaaccatcttttaaacaacctaaacacattttatgtaaggtatgaaaagactgataacaaatttcagttgggacaataattttgatgatcaaaacgcaatagtagtaacacatttaatttctgataatatcgtggaagtgaggaatgaagttgccacttctcaactccccagaaatacgaaaatcttgtcctggaatagtgtgataaatatatggttgccacaacaatatacaattaaactgattttttaacacagaaatagacaacagtgaatatatgatgtcacatcaataataaataagtaaataaaatatgtaagaaataaataaccagttttaaaactaaattaatgagcggaaaataaagctaaactctgaagttttcatctcccactcccattctccctcgtagtcgtaggtctttctattccttactctcattttcaatttataacaattgtcaatattcctattccaaatcaatgattggctaattaagattaaagtcagtaaccctctccttctttctgttttggcagttgatacgtgaaaatgaataaacgcatagcttcaccatccataggtggaagatctctgtgctaacatatgttttcattgctcttacttttttgaatgaaggcctcatttgattgattgattaaatccatacaacatgtgattaattaataggacataaatattgataaaaagagaaaggctcgtttttttatcaaatcaaaattcattttaattcagtgcaagactcattaattatatatttatttttgaaaaaattaatcatttaatccaaactttaccttttattttctatatataaaaccaatatttttagtctttatacaagtattttcatattgtagttgtcgttataaatagcaatgactaaaaaataaagtttgtataatggcagggactaagagagatttgaaagtatttgtgcaaagataaaacgatatgatttttaagtatagagattaaaggataaaatttatgtaactacaaacaataaataagtaatttttcattattttttatgagttcctttctttaatatgtttaacaagtattttaacttaatttttaatttttttattagttaaaaaatgtttgcttgatcgcattaatagtctttggtaaacaaacttattttaataaaatataacattttgatttttaccttcttatattttatcatttttattccaaaatatttattaaatttactttattatctttttctacatatcataagatagggttttattattatttttccttccatctccacatccaatattgtgattgacgtcatctttataaattataattataattcctaaaaatactttttattcaaagtaaacttaaaatatgtaaaaaaaaagtctactaaaatagaatttttgccccttatctttatatagataactttcaaattcagatgtggagtgttttctctgcattaatatatataaagatattatgtatcatttaatttaatcgatagattagatatgttcagttctttaaatcaaaattcgagacttaaattaaattgatcaaattttatttttttcaatttgaaccaaaataatgatttaaatcaatttgagtttttttatactaaaattagttaaaatttattgaattggggagttgatgaccatcctaccatgtagtacatatggagtttgtatagtgaaaagacaaaagataaatagtgtgttttctaggctttaaatcagatatggaatgtttttttttactaaaatgaattaaaatttctgtgatgtattcaattgtaaatagtaatctattaaagttattgccaaattagagcgtgttaactatgcttttttttataaagaaattaattactcaacttatcattttaaactttttaaaataatttatataataaaaaagacagttattgaggtcagcccaatcccttacctaaaaactttataagacgaaaaaaaaaaaaaaagaggtcgacccaatggtaaaggctattaataaaatttacctctgccaattactctatttacctctctttttctttttcttttttattttgttattcaaaatacccttttgtatcccatttttccagtgagggtcaacaacgtgaacaatttccagaatcgtccacctgaacaagttcggaatggcaatgcatgatgatgaggaccatgcatagaataacaaaataatacaattaactctaatcctatttaatatttaatacacattagataacaaataaaataaattattgttatacaaaattattattttatttatatagctacttttcttaaaattataaaaaaataagatttttaaaattataattatatataaaatatataaattataatatacatattgagggagagagactttatcctatcttcttattactggaagaagcttatatcatttgattctaaataagagtctcaatacaagttgcactaaaataaaataaaaatatatattaactggcatgaaatcttaacaacatacactttagcaaaataatgagtaacataattcgtttctcttctaatgtaattaacagaatagttgttaatatagaataaactgtctctacacttgagaagaatggaaccaaattcagtttgtacatattaatttttttattgtgcacacacacacaatatatatatatatatatattaataaaaaaaagtaggacgaagaggagagaggtgttaaacttttccaattaaaaaaatatacttttaaatgagaataaataataaaacgaaacttaaaaaaaaaaaaaaaatagaaaactgaaatagtagaatatttactttaaatgaaaattttaccttcctttatttttatctgaaattatcatattaggatcttattatttactttttattcttatattcgataaaaaaaatcaaattattttttaactaataaatgtgaaaaaaattataaaaatctaaaaaaaaaatttaaggtatcttttcatgaataaattaggaagaagagaaaatagatgttaaatttatatttacaaataaaaaataatttattttgttaaagaaaataataaataaagggaaagctatataatattttattttgaaataaatcataataaaatatttatttaaaatttaattattttatcttcctttatattttatttataattatcactaggattttattatttactttttattctatgctttcatataaccttttaatttttttaactaattaatgtgaatgaataaaaaaaattataacaatctaaaaaaaaaattacctatcttttcatgaagaatctaggaggaaaaggaaagacaaattaaaattttatttaacaacaaaaaaattatttttaagagagaataaggaataacaggaaagttatctaatattgtaaaaatatatattaattaatataatatttactttgaattaaaatttcgcctttcctttttatctaaatttattctaggatcgtagaaattacttgattttgttccaatgcttttacatatagcaaacttaaaaaagtttaactattaataacattaaacgaatggttttctaacaatctaaaaacaaagcgttgttgcatctatttatgaaaaaattaggaggaaaaggaaagagctgttaaatttttatttatagataaaaaataaattattttccacaaacaagcaagaaaaatggaaaagtgatatgataatttttataaaaaaatctcaagtaatagaatattttctgtaaataaaaattatgccttccttcctttcttatccaaaattattactaggatcttataatctgcattttgttcctattcattcatagcaaacttttaaataatttattaactagttaatgtgaataaataaaatatcgttaacaatctaaaaacaagtatttgaggtatcttttggtgaagacatcaagaggaaaatgaaagagatgttaaatttttatttataaataaagcaatttattttctaaaagagaataagaaataatgggaaagatatattttttcttgaaaataaaaactctaataagagaatatccttaaatgaaaatttcaactttctttttttatccaaaattatcactagggtcctattatttactttatatttctatgcttttatagcaatttttaaattgttttttatttattcaacgtcaataaattaaatactttattgaacaatatatcagtttctttgaaaatattagagaatatctatttgacgaagttataagattaattgaatgacttctcaattaatatgttatatgaaccctcccgaaacaaaaaccatttatcttatgattttattgtataaattgatcatatatatcactcatgattgtaaccaacgtccaacttatcatatgataattactcattgatttttacattctaaaatcactttgaccataatattataggagttgtccgctctatataataatccattgattactacgttctaaacccactttgcccacagtattgtaagagttgtttgctttatataataatgtttattctttgaggtttcaaaattgatagagcaattttgagatgattggatctcctttttgaggatgatactctttctccctcttgccttaacactttctctgccacatgaagacggtacccaaagccattggttggatatcacctaaccctaatgcatctttgcctcacctcaactcatccttgttacaaccttgctcttgtgcagagcaaagttggattttgatgcatcttcaccataaccttggttttacatggagagatattttagatttagtgtttatagtgttactcgattaaaccttttacactttatccttcaatttggtgtttgttgttaccatggttgttgaaatcaagatcttatctaggattgagtggggaaaaatgtgatttggatcataagatcctacatttctttcctaaaatacttataaataatatataacttttatttttctttaatttcttatatcatatattatgttttttagtttatcatattattatattctttgttatgttttattttttgttaattacacttataatactattatatttcttcttattcttcttctttatttattatattatatgtaatattttacattttaaaaaaactaaattggactttaattaaggcccaaaaatcaaatatgaaaaataaaataaagaaaaaatttggcccaattcccttgaaaccctacgacctacatgtttctcctataaatgctaagtgtcatcagccactgctgtaaaagtccaagaacaagtgcaaccctaattccttatggtagacagagagcgtagatagaagagtactaggaggttagcgactgtaagaacagaggttgtttggcaacaacacaacaacaacgacacgaaagagtccccacaaagctcgcaaaatacctttatttgctcacctaaattgtttagataggattgtatatcccacatgaaagagtgcaaatttaatctgatctcgcactccaacgatcctaacgacgatgcaacacagagatgtcttcaaaaatcgttgaatcgcacgttcctacaatctggattgtgattctaatagcattggctactgcaccagatagagcagtgattgtgggtgacagttgttgcttcagtgcaatttggatctggatctcacttcttgacttcaacacttcatcaagcaattctatattgaggtaacactattttgataactcaactatatactttaaatttcccatcttttattccatgtattgtatttttcatttaggtaatctattgcttttgagcgattgttttatttatatttttttggtgttttgacttcagcggatacttttttgtgttgatttgattgggatttttggagcattgtttgtttttgcattgatcttatgcatgttgtgacacaaaatggaatgcagttataggcagtagttggtgcctcgatggaggtgtggatctcagtatgcctctccttcacacttgctagggtttccttccatcacatcttgcaactttgtcacacaattctcaatggaggtaacatcgtttcgataacttaattgtgtacaaaatttccattttttgttccacgccttgtctttttcattttggaattctattgcgtctcggtaattgtttgacttttgttgtgtttttggcttcaacaaatccttttgtgttgattcaattagtatttttttggagcattgtttgtttttctattgattgagtgattgttgcaacacaagatggaacaattattcgaacgatggttgataccttagtggtagagtggatctggactgcctctccctcactccatcttccatgcacccactaggtttcccttccatcacacatagatttggcaatttcatcgtgcaattctctgtagaggtaacactatttgatactcaattgtcttttttccattcttgtctttttcatttaggtaatatattatttttgactgattgattgatttttgttgtgttttggttttaataggtttttttttctgttgattcaatttggactttgtttgaagagttgttgtttgttttgtgctttggtttagatttctggtgtgagagaattttgctttggaaattggcacgtattacatcgattctatttagaaatgatgtaaaaaaattacatccattctaacataattaatttgaaaaattctaacattttacattagctgattcgtatagcaatatagaaaaccccaaataatcgacataataagggagatgtagtagtgtaactgtgtgtgtaatctaagagcgtatttagtgaaaatattttataggataaaataataaatattgatatttaaattacatatgtaaataaagctaaagaagcatgtcttttaaatctaatgctagatatacattgtatgataatgccatatataatgttaagttatgtcttagtttatatatatggtttggattaataaaataattgtgtatgaaaatgaataagagcatacaaagaggaggatgagtggcaaaatcattgctttggaccaaaaaggaaggagaaggaaagccatattgaatcagccaaccatggcataaaaaacaaaggaaaaagatatgaaaccattgatttagctgaattggtcttcagattagaatatgactctgaataagataatgacaagtatgatgagtcatgttgtcaaaccaagactaagaacaaacccaactacagaacactcaagaagctaatgccattaacttggataggtttcataagttgatgatttcattttcttaattgttttgtaattgggtctctttctggtcttgatttggtgaatatggctcatcatccttatcatcatcagattcagagtcaaattttaatatgaagaccaatttagctatatcaaaggtttcatctcttttttctttatttttcatgtcatggttgactgattcaatatatctttccttctccttccttttttggtccacaacaatgattatgctactcatccttttctttgtatgttctgattctgtttcacacacaattgttttattaatccaaaccatatatataaattattgcatgactcaacattatgtacaacattgttttattttttgttattaaatttattaaatatcttcaccttacttctcattcctttttttttttaacctttctcaattatgtactataaaatagaaaggcttgaaggagaaaggattgagagataagagatctggatatttaagtaaatttaataaaaaaaaaaaaagtatatctaatatttatgggagatatgtttaacaattgcctatagtctttttgaaaactaaaaaaaagtgcgaacttagagaaaagatgtatgtaaataacatgggccaatcaaaactgttattagggtgaaggatgggcccagcccatgaacccttggagcccatccattttaagggaccaaaatggtaaatgagtgcctgagataagggtagttttggtaaaaagaagtgactgttgcagcaaagacccccaaaaacaaactccaaggttgaagactttgacagagtgagagtgtaaggtagagtcagtcagagatatagaaatggcgtcgtggtgcggtgctcgtagcttccagattccggcgatggaaggcagcgcactgcgcaaccgtgcttcattggccgccggagtagggtgtttgtcggtggtcggcacctccttctggcgctcctcttcgtcaccgaggcactctttgccattcacatgcttgagcatttcttccgaaactcgtaagtacccattatgaagaaaccttcaaatttttaaacttttacttttttgttataatggtgatccttattgtttgtaggtattaagaaagtgttcaaaccgaaggggcacctgcggctctgggaccatattctcaagcaatcaaatccaacaaccttctttttgtgtctggtgttcttggccttgttcccgaggttttttaattcacttaattgttatcacttcctttaatttatgatgttcgtttcttcagattgttgatgtgtgttttgctcttcaatgcagaccgggaagttcgtatctgatgatgttgaagaccaaactgaacaggtacagaatgagacaacattttgtcttgtgatattacattctttgaatgtcaattgttgtattgtatgatggtaacattttattgatgttgcaatgcacttgttgattttgttgctgacatttgatataattaccctttgtagcttcttaaaaacatgggggaaattcttaaagccggtggtgctagttactcgtcggtcgttaagacgacaattatgtatgaattcctcactcatttgtggttggggtttattgcgtttcagcaagattactagtttttgagtttttatttcctgcaggttggctgacttgaaggacttcaagaaagttaatgagatctatgctaaatgtgagttctgtggtattgattttaatttttaatgtttccttgacagttacattcttgtagaaggcgaagcttgcactaacttgtttagtgtgaatccatttcatattgcagatcatgaaagtcctgtattgacaaactgcttaactgtgctaattactaatgaatttcacttctgataataatttgtactgtgctgtaaaaattgatcctgctgcatttgtgggctgagaatgtgttagcctgtaggtaacatacatgtaccatggctgaccactgaccagcttttagattcaaaaccttcatgcttttttatgatttagtcttgaagattcacctgttagcttgtcataataggtaataggttatgttgtcaacttgtcatatttaatatatactaagggtgattactagattgatactagagagtccactagtagcatgctgaaaatattaaggttttccctttgggttggtattatttaattttcactaatgcctacagttacttaaataattttaatttacctacttttccaatgatttcagacttcccttcacctttccctgctcgttcaacttatcaagtagccgcattgccattggatgccaagattgaaattgagtgcatagcaactctataagcatcaattgtactagtacatctggctccatcagcaaactcaggttaataatgcaggaagggacatatcttagtattgaagttttacttagttttgttctttggataatggtgctcttgtgattacatttaccatccaagcgaggtctctaatcttcggattctctctcaaagattatgcatctatttaagtgaaagaaacttagtcattggatgtttcttgtttgcagcttttgtgacatcgtatacataagacagaccatgaataagatcatttttaataaatatttttactcgaactcacatctattttctttagattgatttgtggacgttacattgaaaaccttatagtacgtactgattatcttctttttcttcatattttgttctttaactaaagatatcatttggctgatggttagatatgaattccttttgaggtactatataagtcactgaaatggattgaccaattcataaatataagtaacagaaaaagtaaccatatacaattagtaaagattgtttattaattaaacgacagagataaacccgtttcacttctctccctaaaatgagaaggtttactttagaagatcctgatccttgattagtatccgttagtaacttgtttttccaattcaatcttttgtaattttgtttaattatcatttgattagttatacttaaatttctctaccgatattataaattagtttgcattttattaatttaggtttttttttcccaaggtataatattacatttccaaaaatcttatccccaagaatactatgcttacggatgaattttcataaacatgtttgatttggttggcatttaataattttagaaaaatatttaattaaaattttgaagaagaaaaagtagaggaaaaatgtggaagaaactcaagaaagaagtaggaatatggagttattttagaaaagaacttttattttcatgaaaatgttttatattcctaagaatcaaccatacgtggatatatttttttttatatataaaaaaatgaagtaaacttgagattgtgacattcccaaattcacttttctgaaaataatttgtgaaatcttaaatcaaatccaaccttaatatttaagctgttatgtttttttctataatttttccttaatttcttgtgttaacaattctggcttccctaaccaagtttatgaagcaaccttagatattgaaaatgtgtaacttgttttcattgaaaagagggaaagaattcaatctgagttgaacgatttagagcatatttgactaaatgttggtgaagaagaacgtaaatttgtcaacttatcatgattctttcttttatattggaatgttggatttgtctcaaaattggtaagacaataatttgaacggaaaattaaacatgcactcaattattcaaactatcgacaaacatttgtcgatttttgccagttttcaagaataaagataaaacgtaaaacatctttaacagtgaaactataacttttctccctctatcaaagtctgaaaaaaaaaggaaataaaaaaatataacgggcttgcttttttaattaaccaacattacttttttaagtaaccgtaattatacatagatgttatttttaaaaaaatattaaggtaagtgacgaacattaaagttattcataaagttgcctttctcataattatataactctatcgtgtcaatttgtacagtatttagatagaattttctatccatacttataacagaaggaaataaaaataaaataaatcatatttatattctgtaagcaaaatcgatttatagttttcaactttaattatgaaggaactaaataaaagagctttttataaaagttaaacagtgtaaatactatgtttggtaaaattagaataagctaattgacttaatgtttgataagattaattgataaatatcaaatgtaaaaaatatatttagtatttttaatatttaaattttatttttaataatttatcatcttaaaaagtaagatagtaatttttaaaattttgtattataaaaaaatgatttttttaaaagtaacattaaataaaataaactttattagaattctcttgtttaaaatcattttttaacatttaaatactttattaataatattattttaaaacaaaaaatgaaaagtgttttttataatttttcttatatattcatttgataagaagaacttagatgtgtatgtttctcacttgaaagactatgaaatattatacaaatcatatattgtttagcaaggtaagggttttttaaattgaattaaaaggtaaaataaaataggaatgataaaattaagaagaaaaaattaatagcttataagttatcttatttttgataaactatttcaaataacttatcaaaataagctatttaaagtagtttatgaaaaataagctattaaaataaattaatgtaccaataaacttattttagttaaaggaacttatacgttatttaaaaaatttataagttccttaaatgtcttatcaatcataatcaattattctaattatatatatatatatatatatatatatatatatatatatataagagctcattttattctcttataaattataaatacatattaaaaaattattcaaacaagaagatttatttgctgatactttctcaagaatacattgcataaaaaatgtggttccacggctagactatcaccctttcttgcgagttgcgaggattaattcccatcatcggtaacaaaacaaatataaaattacctgttaagaggagaaaatactatttcaattaaagataaagtatgttatgaattaattttgatggattttggacgaacgaaatgagagggtcagctacccagaaattttcataatattcaggtttgattagggttcataggaaagagcctttccgatatttgaaagaaaattaccattaagtacatgagtaaactatattacaaaacaataattagtgttttttagccgtataaaataaatagttttacttgctgaataaattaatttgtaagctctatggaggccttgtcatcttaatacaaaatgagtattaaaagatccattcaatatactttgcaatttccatgtcatcatcttgaaaggattctattatatcctacgcttttatccgatgaacatgctcctttttttctacgcactgattcttttatggttggggaggggattttgattatctctacgcttgaaaaggatttcatcttcatgcgtgcatatgcttttattcaaagaaagcatgcacttttttttgtacgtattgattctttttttcttcttcatgtgagtgagggttttttttttttttgattttatttttttttttatgtgagtgagggtggggtggggggataatttacccattgattgttctgcattgcataacattagagtgtgttagagaatatatatttagttgttgtgtaattgagagaataaatataaaaaaattatatcaataaatcataaataatcatataagaatgtatttttttttacaaacaacccataaaaatgtattaaagagtgtatttggaggatttctccatctattagtatgacaaaaattttgatgacatctcataagatacatacgaagaaattaaatgatatttgttactatttattgattatttaaaaaattcttcccgcaaaaaatataaaatattaaaatattaaaataaataattgtatttttaattcaataattattttaatttatgagtatttgtttgaaaatgcgaatttatccaagtgattaaagatttataatttttaccttctttatgagtgagttccaatttttctaaggtcactttttcaatttttccacttgtgtatgtgtgcgatcctctctgggaaatcccccgatacctattggagtgtcttaccattgtaccatttacagtgtcaaaaaaatatatccatgcattgtaatgaacacttgatttatacttagtgttttatattgctttaaaaggtaataacttttgtagttttgctggataaatattatgtttaattttttttaaataaggtatagaaaaagatttttttatagataaactaatttaaatattcaattaactatttattgttaatataagttcttgatattttatcctaaacttaggaattaagttttcttaatgcttattttttccattatcaaactttatttttagacattatttatacaaaaatattatactaattaaaaaattaaatttcagtaaaaaataatttgtatataaattatttatatttttatgttataaaataatattttttaaaaaagtaaaaaatatcaagtgcaacacacttctccctgatttcacagtactctaggggggattatgcatgaaacttatatttttttatttctcttctcaagtaaatgcttaaaatttgatatgtgcatcctattcttgtttttttattttcttcttctctgtttacatgaaaaaatataaaataaaactttagaagcattggtaatcacataacggtatcacataacggttcttttaatgttttttttttttcataaaatacatatggagaaactaaaaggctattttactaattctaattattcaaaaatgttaaaatattaataattatatttttaattcaatagtttctatttttatttataaatatttgtttgatggcacatgtatttaaaagtatccatgctttatataactaaaaaagtatccatgcactgtattggatactcggtgtatacttacaagttacatcttttattgctttaaatgtttagtacacatttggttataacttttgctgaaaaaacattgttttttagttctctaaatatatggcatataaaaaggtttttactatagatagactactctaaatattcaattaattattttattattaatataaattcttaggatttgatggtaaactttggaattaaattttcttcatctttgagtcattatttattatttatgcaaaaataaattatttgacataactttcttttaattcttttttttaatcacaactattctctattagaaataatcatattcgataagattacattgagccacaaaactatccatccaatgctcaatatttgaattcaaaatctctaatatcagatgattcacatgcttaatgattttaaaaatattttttttttatctttctttcaattatttacatgaaaaattacttttatttaaaatactttgcaaaattggtacattcctttaagttacaaatataataaatgttgtgaatgaaaatatcatatttgatcggaagaagagatattactatattttttttacggggtatattactacactaagcaagtctgttttttaaataaagattattctcgctatcttaaatatattaaaaaataattgattctcgataattaaaaattagttacaaacaattgcaccgattttacttttttttttcctttgtaaaatactttttattaaaattaaatatcaagaatcaattaaataaaaatattaagtaatgtgaaattaattatatttgggaccactaaacatgacaattttcccagacgggagaaaataatcatgagaaaaaatggtgaatacaccaataaaattatttagaaaataatacttttggataacagagaataaaatagggaagatgttgcgaatgctaggtgttgggcatggaagagagtagtggggcatggcgaagaaaatgacggtggcatctgaacgaaaacggtagcaatcccgttaagttaatgttaattcttttgacgcataaaaaggaaaggaaaacgtttcttattcaaatacctataccaaatccaacacacctaacaagcttggttcgtattcattctctccttctcctcagaccaatccctttttcaattctcatagcatagatctccattttccaattcaaacccttttctctttcttccctttcttttcagaatacacatgcggtgttgctttagttattgtgttttagattttgaatatggttcttctgtgattgatttttaggttggtaagtcatctacaatctgcatcatggaaggtgttattctgagaagggtcattccttcggataacagttgccttttcaatgctgttgggtaagctaagcaatggaacacaggcccttttttttttggaattactgctacttgtacaaattattccacttgtgatgttctttctccttccttttggttttgtttaattgtttcagatatgttatggatcatgacaaaaagaaagctgctgagttgagacaggtaatttttttttctgtattcagtttatttgtgaatttgcttctagtgccgaggggtgcttcatttctggctggtcaacttttgcctcaagatatgtttttatttttggagtaaaacatgttttggtccctcaaaatatatcgagattcagttttaatcccacaaaatatagagattaatatgtttttagcccctacattttaacaaaaatttcaaagttaaatatataatcttttctactagaaaaatatcatttttcaaacttgaggtatcaaacacaataaactcaagatttggaccagtgaaacatatcgtagtagtgttatcaatgggggtggtagaacatggcggaagggtaaaattcctccatgtaaacacgccacggtgggcttctcttcacgaattgcctatggtggttggcaaaaaatctgccacgccatgacgcctcctttaacaacattgtattgtagaattcattttcaaatcagagacctctctacaggattggaagaaggacttttcacccaactagttagagtcctccaaccgtgtcattctcgaagtgtgatatgacactgtgaatacagaggttggaatgtgttgaagcatactataaaattaatacatttttattccctactttttcttcaaaaacatgtgtttttagttcttgacaagagactaaaaccacttcacttttaataaatataagaactaaaacatgttgaatttttatagggactaagaccaaatttctagatattttgagaaatcaaaaacatatttttattctgaaatgttccttgtagtcatagacatatttttattaaaattcagtaaaaagagcttttggaaactgatagttggcttttcaatcattaaaatggttgcaacaaatgctaaggatgagtgaaatacttagatattaatatattagataagatatatctagtacctaataagatatacatattttctgttgtaattggctctatataaacattcatcctattatcaataaagtaagctgcaatctacaacatttcctacatggtatcagagcctaataattccaggccaatttttttctactgccatgtcttcttcacgtaccttcaaaatcaatgaacgcctgcattccgcagttgttgctcataccacttcaccagctcctctgtggcttcatcatcctccacaccagcgccacttcctgatctcacacccgaccgagatgatccaacgtatcctgactcttgctgaccaatgcaagcccatgtctgaacctttgtccaataagccattgtcctcctcttggcttattgacagcggtgcttcccaacacatgaccggagacctctgttccttacagatcttcgtcgtattgaatatttagttattttttatcttcatactgcatgaagaatttttcagatgcagctatgactaataaatgcgctttgagcatttttattttacaaaaatcgactttgaaatattatatatggctcaacatacctatttttcgctagctcttgttgttttcaattcctgacatgagacttaagtaacttctctggtagatctccatattttgtcatcaattcatcatatgcacttgtattatggtccatcaagccccatgctgtgctactcaatgctttccatgaaattacatgcaactaaaatcttgtcatggcaaaatatttttattttcagatatgaaattatatagtctatcatttaagaattaccagtcaagtggaacttttataccattgtattgcctaatatctttgcattttgagtatgttatttcattatttcttacatattttgacttaatatttgtgtgctatttgtcatttgacatgctaaaggttatagcagcaacagtagcaagtgatccacagaaatattgtgaagcatttcttgggaagccaaacacagagtattgtaactggattcttgactcggagaagtggggaggttagttggcctatgtttttcgtaatcaaggctattttaaataaaaagttagatggaaatagttaccaattttcactcacaaattggaactgctacttttggtgttactgtggtgagtgtatgaatgtaatgtgtggaaaattcatttttatttgaactttgaaggtgatgaaactcactcaaagataggttgatttaacatctgagcttttaataaactttgctaagataaatatattatggagtatatatgagtaaaatatattattttcctgaaacgcagagaggcataaagatttaattaaaatttgggaaattttatttaaacatctggatacccagagaatcttctgcgacaattgtttaaatttcagttttgtttctaaaattaggctttgatataaatttggtgggtatagattttgtagttgatgaatttgacatgggtttcaaagggtatttcaaactcctactagcaaatttaacaataaagcactgttaactttttgttagtttgatgtgctaattaagctctatatttttgtgaaggtgcaattgaactttcaatattagcagattattatggacgtgaaattgcagcatatgatatccagacaactcgatgtgatttgtacggtcaggttagccactcttatgcaatctatatgctctcaagttttgcaacctcttatgactgaacttttctattttcactttttgtgaatacttttgacaggaaaggaattattctgaaagagtgatgctgatttatgatggtctccactatgatgcattagtggtgagtaatttcatataccagattttttttttatcatccattccttctcttctccgaccccaattagtttgggttaaaggtattattattgatgttgatgttgattatcattccttctctttgtgcattttttttttgtggttttggaggtgaattgtgagattacaagtatatggtatttatatttatctactacacatgaaacaataaaaaaattaaaaagttaaggttcatatgtatttttgttttcatgttgcctgatgattactcacaccccttgtatgggtcagatgtctccctttgaggaagctcctgaggagtttgatcagaccatatttgctgtacagaaaaacagaagcattggacctgttgaagggcttgttctaaattttgtgaaggaccagcagaggtagttcgctattcttattgaaccttcttaaaagaaagagataaatattatcatatttagataattgaattgcataaatcttcatatttggattctttatatatcagatttgttgtgaatatcggtacctaaaaggtcttctttttgggcatgtattttaaggtttcactttcagaggagttgggatgcatttgaatttggaggattgtggaaatattttctattttagtaataattacaaaattcacctcaattcatgtttttatgtgcaaatatttaaaaacaaaaaataaagtgaaactaatgacatttttgtaattgttagtgcaaacagaagaagacatttttgcaaatccagtgcaccttttatcaatttagaacaagaacatagtgaatgtgccgcaaagctgttaatgtatatacatagactgataagttgaaaacttcaactttgccaatttctattgtcaaacaatacaggtgaaattatgcacattttttaagtgaaagagatagttgggctatgtatcttgtctgccagtaggaacgtatattttaactctgcaataatacaaagggaagtcagtttgttttatcttgcatgatgtaattttttttaatcttctcaatttaatttcgatatcatctcgaatggcctctcccaattatttctgctacttagtatcattgcatttatgctatgcccatgatgctaatatatcatggctacactttctcaggaaacggagttacacggacacttctaacttcactctgcgctgtggagtatgccaaattggagtaattggtcagaaggtgatccctcagtacctgatgctttgctttattctatttacccaccttagcctattctcctttgttctaatgattctgagtgctttttttttttttgcgaacatttcaggaggcagtggagcatgcacaagcaactggtcatgttaacttccaagagtatagatgatgcactctgttgatttgaatgagataccaagttcatgtgtaatctccgtggatttgaatgaacatcattgatgaaaggtagttgctttgttgcagacaataaaactgaataatttctgcatgagaattgttgtggcaacttgggttgtaatattagttccttggtctcgttccacaatgactgattataagaaactcacctctagtggcagactagataaagaaactaattagtagtcaattttttttttttttatattctcttcctggtaaagatttttacctaatgtatttcacttattttccttttataatttttagtgcaataactacataaactcacgccactattttaaccttggccagtgttgaatgcttttgatactatatataaatcccttttaacgatagtatataacgactctcgaaacaaatttacaaatacttgttctagccgtcaagcttattgttaatcatgaatttcatatgttgatttatgttgggagaaaataggtattgttattaataaaaacagtgaaaaattaagttgtgagttcattgtatttatataagaaaagaatatctaagatattcaatttttcatttatgtcatctatggattttccaacagaactacatatgtaaaaagcatatattattgtattgacttttggatacacttttaaggacatttaagactaaggtagagataagagctcaaaattaacccttggcccaatcctatggttataagaaattttgttgtgattccactgtgtaattgtgttctcaccctagtcttgaacttcctcatatatatcattgattgtttgaagatgtccaacacaaatttctttcttctttatggccctccacaatatctttcttagtatttgatcatatgtcttttctaactcaataaagaacatatgaaaatcttttttattccaacgatttctcctcattaaatgctatagcaattatattgcttgcatagtttacctcctaggcataaatctaaatcgttttagtaatatgagtcttttttcttaatcttccctcaatcacctttttctcataacttcatcttgatcgccaataatttgcataatcttttttatatcaatattcttacaatttggttaagagtatcactgcttcactcttctggtattttcttgggcctcatactcataaccttgttaaacaatttttttttttatagaaatgtgccaactgatacctttctcccaaatcttacaataaaaggctaattttggtcctcgtcccttgtgtttaacctgatagaaatttacgtacttaattaaataacttctaaaagttatttttctgtctttctatagtgtcttgtacttttgttccataacaaaaacaaagattttattgtcttcatccttaatgcacttcttttttatccaaatcttgactttttctctctaattttagcaagcctatagagtgtagcagctctagctccacttttgatacctaaggcttggcataatcgaataaaagcttttagttcttggttcagttcctttttggtacttttcttaactatcacacattttctagttttcagcattctaacacaagaatcatgctttaaaacaattcatttcaatcttaactttatcttatacactagattccatcatcaccaagatgttttatcctcaggtccccaactcttgattcttcaagtgtcttttagctatttttccaaccctttatcccatcttgactttttctcctttttctcttttcctccataatctgatgaaaactttggttttctccttcaatagcacactttgttgatccatcatgattttttttttcttttccacacattcatgactaagactctgttgagtagtcaaactctcctaagtatcactttgtagttcatgcaagtttttttttttttttatatacataatttccttgtaaaaataaacaatttgagatgttcctccctcttcctaaaacagtacttattattgcgaaatcataagctaaaaaaataaaatcaagtagtgaatattataatttttatgaagttcaataatgcatgtacccaatacaaactacaaaagctctgcaacaaggtcattatcacatgtgtcagtgttattactttaaatttttaaccacgtttcaattttgaatttttttaattatatacacaatctgtcgatatttttcttgtaataaaataatgatttaatccattcgcaaattgcagtgaatatatactcctatttttttatgaatactcctatcagtcgtttataatacaagaagataaatgcaacatatatatcaatatcatattcatgggtgagatgatggggaagtcaattttattttgaaaagcaattacaagatggtgatattgatatggtatatcatgtcaagtgaacattactcgtttactatactaatatcattgtagttgttagttttaccacttaccaatagaaagattgtcatcttgtaagcattgagatcgagtgggtgacgtattgtgtgcgtgtgcgtatacagggtgttcttttaaagatgatgaggcaatctatatggcatatgaacgtcatacgaaccaatgaaaaaatatattgcactacaaaaaaatatttaaaaccttatggaatttcttttgatcggtatattatttatcattaataaataaacatccaataagtttcaatacaaaatttattaattgtcaatagttgtaatagaaaattactatagtgaagatataaaagcattattcaaatatagccatataagtacttctgcagaattatttagcgatactcgggagagggaggataaatctttttgatattttattgtaaaataaaattactaaaatcaattcaatcacatttttatcaccaatgccatagtcaccttaaaaaatcatctttatgaacatgtgacataaatttaaacaaagctattataacaagactcattcagtcaatttttgcctgtgaaaatgcataaattggctttaaattttaaaaaaataatgctagtagattacctgtaagtagttttttcttatgtaaaaatgtctgtcctaacttgactgaattggataaacgtatctttgcagtgtagattttttttgttaatttttttcagatatgacatttggagctttttatatcaaataaccaacacaaaattttaaattattttaaatcattcgtcattttttaaaaaaaagagcaaataattcatttaaaaaatactttaaatcatatgtatagtagttttatatactattaattaagcaaaataagagaatattataaaatgaaaaggtaatataatccgagtaaattatttttaaaattaaagagtgtttaattacttttaaatttttgtacataatcttaaaatgatacttattttaaagttgaggaatagtaatttgttgttataatagtcatattttgggtttggacttggaagtactgccggcagactagaatacaaacatttgtggtaggacttaggaaataggagcagtgtgaactcaaaacttgagatgtaattctatccacaaagctctcattaattcatgattgatcaaccaccaaatttcgatagtgacgacaaagagatttagttgccctaggaattttggaaggttttacaccatattttagaaaaatatatagaaagtgtgtaatgctgaataggcatcatacctactactccaagcttagcattaaatgatacaaaccttagttgtaggctagagcatttgcacagtttaatctcatggtgttgggtccatgacttgtacttggtccaactttcagatccaatttccaaatcaatctttttttccatcatgtgggacatgtatgataaattaatagtgcaactcatttcaaaattgccaatgcactgcttctcttcaccccattcaattaatctaccatgttttaattcccatatatgtactactattcacagcactgccatccattgtcataatgttttactaattcaaagatgaaccatatgtgggtaatattaggcaacgtatcttgaaagtgatagcttcccattgtttgttgaaaaaaatatccatttttgtttgaataaaaattactcgcgggccctaattaatccaccgtttaacgttacttcatacaatatgtaaaaaataatgagtcagcttttaggagaaaaaaaatggtaaacatagtccaagtcgattagccatcaatcagaaatataaaaaaaatatttgtaattttttcatccttttcgaagatcttaccaagccttaaaaaaacaactctccttttctcgtcaacttcaatgctgctattatagagactaaaaaactaataacaaattgtgaaagcgaatctcacaaccattcattcacgccactcgccactcaagttgaagaatgaaagtggtggccaccctggacacaatatgtatggtggagcagatagaaaaacatgttacagaatctcatcacatttctcaaccccacacaaaaatttatatccctatatacagtcatgaacagaacataccaatggagttcggtcgagcaaaagaatcattcttcacaataagtaaatcaaaattcgaattcttattagaaaaatatattgttttattgtggattattatctcttgaaagtaacacatatcagaaagacaaacaaacaatttaattgaaattatttttataattcacatatatctttcattaaagacaaagcatgatctaattaagtaaaaccaccaatattcagatagcaaaagtctatttctcaaaaaataataattaagatgaaataattttgtatcaattaataatataaatagaaattgagaaggacgagaaaagtaaaaagaagatagtagatcaagataaatcaacctctaatagtgatatatgtagggtatagcatcaaaagggtactaaagttttgtatttacaaaagaaagaaaaaagtgtaagcacccatccacccaccctggttacaatattaacattcccctagaagcacagaacaaaaacaaaaccctagtttatgatggaaggattgagccaattaataggcccaatacactgctccaatatctaattaattacgttaatgatcttctggaatgctttgaagagcaggcctccatggacgttgaagagagtgattgatcatcaagtgcgccaaaacctgttccattctcaactccttcacctccactttgccaaccaactcctccaactgcttcttcgttatctttatcttcacctctctcctccttttcttaacaccgccgctctccgccgccggaaaatcctcccagtcctcgtcctcgtcctcgtcggtggagtatccaatccgcgattcgcgcctcaagcagttgcccattttgttttgtgtggctttatgaattgcaatgatggaaagtaatagctaagtgggtgatatgatattaccctatgtagcaccgataccgacacggtattttgatacgttatcgatacgtaacttcgatacgtgatacaaaagttttaatatttcgatacggtctcggtacgtcttaatattaaataattttttatataaatatattttatattaataaaatataataaaaaaattataaacacaactaataaaaaatatctagaaaatgatataaataaaatgataatagaaaatggtaatagaaaataaataatggtaatagaaaatgatataaataaaatgaatttagctgtaaaaaactcacgctcctctctcttcctccactaactccacacctcactcacgctcctctctcttcctccagtaactccactctcctctctctccctccaggcttctgttttctgtcccatctccgtgactccttccacggctccactctcttctccggctccctctcttctccggcggccagccgcgctggcgtcggtctccctccactctcctctccctcacggcctcacctcacggctcacggtcacaggtcagtgactcagtggtcacgccgtcagcccgtgcccgtccgtaacggcctctccggctctccctcagcgtcaagctctctgctctcagatcgctggtcgcgccgtcgcggtctccctcacggcctcacctcctcagtcctcacgacccttcgacaattttttaccactggatacgcgaatttgcgtatcggccatgaatccgtatcggacgtgtgtccgatacggtggaaaaaaattatgcacgtatccgtgctacatagatattaccaatatatagagagataggtaatgaaaaaattaaatgagaaaatgggaaaggtcaaacctaagtagtgccacgtaggatttcctaggtggcaagtgtgggcccctttgactctaacggacttcaagttaaaggtatcttacgggatcacattctagccgacgcttagacttcgactggcgcggctctacttgcttttgccatcccaataaaatgtcttataaataatgagaatgagccaataattttttattttttattttttatttatctaaaagaatcgtactcaaataccaggtgatccacagtaactcacggacgtaagttaactttcataggacttttgtaacactatttttattagccaggatgattttaatttaataaatcatttcgagtctaaatttaaatatataattgagttaaatctctagagaaataattttctcatcaatttaaatttaactcgagtgaaattatattttgtataaaatagttgcattctaataaaaaaaaagcaagcccactattattaaattaattacgttatttatttcactttactataattaaggattttttctaagtctctaataaaagatatttgtgatttagacaaaaaatatatttcttctcaaggttctattcaatatattatttattttattattttatacctgaaaagcaagtaccaagtagggcgaatttttttggtgcatatacagtaaaattaccagatattttctgaaaaaaataatgagtcaaaaattgtagaacaatattgaagcataaatactgataagacgaaatttagatacaatttcataaatatttttaattaaaattaaaggtttatttcagtaatttatattaatttttaatgaacatatttattatttaaattgccgaaataaaataatattattaaaaataattacagaattgtatttaagtttataaattgtgtatctttaagcaatctagtggcatgcaagccatgaacagccgcgaagcacaagtcaagcccctcaaagttcaccaattaaattattattattatttttgtcatgcagacagcaatgaaatgttcaattcaatattgtttcaggtgtgaacatgggcatggtaggaatctagcgtaaacttttttaaatgaattatctatattcttttcattatttttaattacttaaaaaggcatttccaaatagacaaaaacgaaactgggcatttccaacaacgataaattgttgccaaagaatttttttctccttgtatagtatgtagaaaaatagttattatataattaaactcaggatacaaatctcattttcatttcccttcaaattgtgacaaatgatcaagaagctcgtgttataactttatatgaaattagatgctactataaatttattggaaaatgcctttttatgttatgagacaaacctagttgtcttttttatacaaataaattatagctatttaagtatgcggttaaactttaattttatattccatgtcagattttgatcaaatgtgttcttaaaaacacacagcttcatcaaaatatatatatggagggatcataaagtgataataaaagctggaattagttggtaggttttaggtgtgaaaagggtataaacctggaatctgaggacaagtttcaaatagaagtagccacgtcaggtgtgaacacaaattagggaacggaatctttgagtgaaggtgctgtttggctaccttcctttcacgtgcaatttctatttggctgacccaaacacacttttttcattatcataaccctaattatatatgtagcttatatatactccctacacgactcttgtggaaaaatgatcaataataaacaacgatcgttaaagaacgcttttcatttaaacaacgacatagtcaattccataattattagttatatagagttattttttatttggattccatacacactgtcaaaatcgatcggttttacctcctctgttcctctcagacctattctcaaggacattcttgatgcgttatatatatcagaagccagaaggactacaacgatgcgttacataacaccgtaattacttcttcctttaaaaaaaaaaaaaagagatagggattattttaaaaaaaattaaaaattataggagttatagttatatttttaaagaattaaattaaaacttattatatttgcaaaaactaagaatatattaaactcaattttttaataggccagtgcgatggttgaaaaaaatatgtatatctatgtattgagtttttaatgtgtttaaagattttgaatgatatagtatttgtttagtttcacttgggatgttttaaaattatgttcaatagcagttaacgtgatttcatgtaaatttttatatttatttaattttacttttgatgaattgattttgagtagataacttttacatgtactaagtttcactactaacttgcatttataattaaaaaaaacttaatatttttaattaaaattaatatgatttgaaattaattttactaatactcatcggccttatcatagcccaatgcccctctcattcaacgatcatattcttacgcatataaaattcatgcaaatacaaaagcacgagatgatgaacacaatttattaataccttactgcaaatcaagggattaaccttaaagacacttaacatgcgttatcatgcaagagacaccatcctaactcaataataattttagaagtaaacctaagaacatgttccagtcccaagtaaacaattatctctataaatttacaccctttatctactattgcaaatactaacttaatcgtcaaaatcattgcaagtgctccatggaaactggactagtacgaagaaaatcatatgagatttccaaaatccaccttaaatagtctttgccttgagctggggaagaacaaatatgaaactaggttgttttgtcacaagattcttttcgttgccatttcaaacgtgctatcctcttattgaatatgaataaaagcgaatgttagcttatagtcaaccttttggcttttagatagttaaagttaaagcaaattgcatagcagattcgaattgtaatagcctatctatttattgatatgtcagcattatatatgttaataagttgatatgtttatcactatatgattatatattttaaaaaaattataaatttctaagaaactttatccaaaatataagtaaatttctaaaaatcaaaaccttgaatcattcttgcacaaacgcgaatgctggatcacgtgctgcacccatgaaatacgtgcagccactcatgactttatgtgtgcatgcaaatgttgggcgccatggctatcttaatctcccaatggcttattttcttttctagggccatttcattgttgttatatattatatggtcaattcaaatatgacttttaacttgtcgaatgttgactactatcttccctttgtttgacttctaagtcttaattaagcagcagttagctgcagactctagctaaaatattaatgtttttacttggctttcatttgacaacattgcagggttaaattttaaatgaatatcatagtattttgcccaagacttgtgtagttgtgtacctgtgttagtaattaactaatcaaaggaaaataattggtttctagtagctacctaattttccttaaatattaattaaaaatcaccgcgtgtaactgatgttgattgctcgttttacaactactgcgtcaaatgtactactctatttcaataacggccttaattaattaggacttgtaaaagcacaataggttatagttgaaattttctactttccacgtttaggtgtatcaaagttgaataatcagtaataaacggcgttatgttttaagcatggcatataagaaaatatgaattataaaagttaaataagtcacatctgagtgagtgtaatacatgttggactgcacaacatgtcaactactgcatatgtagcctccattgacattttttttatcaaacattaataaaaacattactacaaatctttagtaacattaaaaattatcgtcaaatcataaacaaatattattaaaatatttttcacattatatcaaaattgttaaattcttttttaacatttttagactttaacaacatgggttatacctaataacattggataaaatgtcgcaaaaatatattagtaatatttatttataatttaactatattttttaaatattgtcaaaggtttttaatattaagtgatagacaaaatattattgggaaatattacatatatactaacgcccgttgattttttatgtttgttgttgatgagctttacatttttgtttttttaaatgagacaataataaatatatagaaattgccttatagaaattgtaattagttaatattattaatttgtaaatatagttttttaggattaatttgtagtcagatacttttgtttatagatcagtaaatttacactacagtcaatctattacattcatattaatgttgattacctgttttttctttttcttttctaagcagtaatataaattatatagagtaaaaaaactactctagtccatatctaaacttttagtcagaccaaaaatagttaagagactccaaaacttacatcattgcatattaatgttagttactcttgtataaacaggacttgggagtcccaattaattcaacacaagaagattgtttcaagaataactggccgggttaaagaacccaaaaaaaaatctccattctatatattcatattaaactgaatgtactaatcaatgtgtgctgaagaatcatgttcggaaaaaagtagattttcaatacaaaaaaagaacaattttgagtcactttttacattttctcttactctatcttctcctttttgttttatcatttcttttaaattaaaagaaataaaggatgtaaaataatttttattttagtttcaaagttttcattttaaacattaagtttaaagtcaattttaaataaaaagaaaaataaaatttgaattaaaacacatgcatacaaattgcattgggaaattgcttgatataaaaataaaataaaaaaatttactggcaatgcccgttatataggacaaaaattcaatataaaatgaatgttgtaatattcttcaaagatatatacatacaaagacagagttgagtggctatctactatatagtgtaatggctatgttgcagttatcaagtgatcatcgtttgactctatatcattaagtggacccctatctttttcttaaaaatataagaccacaaaatgttttaaaaaattgtttgccgacacctactaattaaagacctcctttttttatcctttaatctttgagagatattacttaatatgtagagtgtagactcaattcctttttttattcggttgagttgaataagttcagtgagtttttttttataattcagttcagaccagaccattgaggttgaggttacacttatttcttaccctaatgggcttaattctgagccgaacttataagcccagagtattttacggtcgcctgttgtggaagacaaaaagcccacgacacgattgagtttacgtactatgggcctttggcacagtccaagaccaatgttacaacccctgtctctttttttttattagatacataacccgtctctatctcttcacaaaaaagttataaataaataagccaatccaattttagttctttttgtttatcaaaatttaaggcgagaggttaaaaaaaaccttaataaaatatacttagaaaaaaacttaaatttatcacatttcaattatataagtaaaaacttgaaaaattacgaaatcctattttactgtatttaaccatttttttcaaaattttcaaaacttaatccttagttcgttgttaaatgctaaacaaacaatagctcgatgtaaagaaaaaaaaaaacgaacaatttccttgaagaaatgtatactttcctttgtgaacttccctcgttaggaaaaccaaaatgtaaaggaccaattccaattataatccaaactaaagaaaagactaaacaagaatcctaatctcatttttccttttgcccgaagaatgcatcataatctttatgtactgcaacgcatttatttcacggattattttttatttttgaaaatataagattgaaaaatattattctcatacttattatgaggtaataaaataattattatcagatatataatatatttttttaaaatacttgtgaataatatttctctgtcatattctcaagaaaaaatattttcagaattaaataaataattagtgaaacaaacgccctgtgaattgatttgtttgttagtttgaataggtaaaaaagttgcaactatacgtaagaaaatgataagaacattaacaaaaccaaggagctaatcacaccacacacaaaaaatctcgtaaaaagctgataacaacgtaataaatatattatattaagttgttttaattacatcattacttttaactccgacttttaatatactcaggtggaaaaaaaaaatctttttaaatccaaggacacatacccaaacggaaattaagttctcatgtaacaagctacaagctacatcaagtaagaagtgtaaaacaattagtttatacggacccctgttgtataatcattatggcttctggtataagataaaagtgcaaacctatagctataaaaatagaaataatgacactaaaaatggtattgtttccataaagtagtgacccaaacttttctttctaaaggtactaaaaagaagttccgtgtttttttttttatgtacatatacgaaaaataaaacagcagcaagaaaaaaaaggaacacaaactagataaaaggggctttttagtttgtgttaattggaagatatcaatcggaatatgcatttctaatgggatttattccctattaagaggtaaagcttttgtttgaataaactttttaataaatatttataaaaatataaatataaattgaatcaatttttataagttaaaattaacttatatattaattaaaaagtatttataaaaaataaatgaaacaacttttataaattaacttgatttattttattttaaaaaataatctttagtacatatatattaaaaaaaaatataacactaaattttatattatcaaggccagttgattcatgccttttttgataaattgtgagatattttaatttaataaaaagtaaataatttgaaatttgcacttttttactttatacatcatctctctaaaatcgtgaaaaaataatacatgaaccatatttcatgacgtgtcacccttagatgcactatttttttgtaatattctaggcgttacattccaggcaaactccaacacgaaaggtgatgggtttaatgtgattttgattgggaaatgacgtccctacccttacactttaaaaggtggtggtaagttggggaggggcttttaagtcttttcgggattgatgccagcgtagagagataaactgataaagcatgattgttcagctccaagggtcgctttttttgcagtgatcaaatcctcatcttctctcaatcctcaaccagcaacctctctctcttctgctatcactctctcactcagtcacttggggtacgtattgttgtgttcttcattctccaattgcacgttttctctcatttctcaattcaatttctcccatttccctcttccttttaacctgtgaggaaaagggaattgtgggttctccttatttcagttcaatttttcttcttagtgttaaaaaaattacctttattattgtgtggagattgattcctgtaatttgttgaagggttgaagatgagaatttgtggagcaggtatgggttgatattggatttcctttaatttatttggtggacttatttccttcatgtttatgcacccaattctgggtcttgtgagtttggttttatttttatgtgattctgttccaattcccaatttatgaatagcaatggatgcacactgggccagctgtttgcatgagaaaatataattttatttattggcacaatctttgacccaatacggatttccatttattggaaattctatgaaattggaatcttatactatactacttgtcttctttttcttcccccaagtgagtgctaatagttaaaccataaatcacttctatatttcataacaaggatttgtttttctctatttctgtctgattgcatacatgcatgaaagaaagagtatcggctaattgttttatttgaataaaaaatagtggcgtgtttaagtgttaaattagtgttcaatagtaggcacagttgtatgtgagtctgcagcttgtaaagttgtagtccatgtttgggggagaaaacacatatactataagaaaaaatatccaaaagttagagggaggaatatatgtgattaggactagaacataaagtgatgtgatgggatgggagtttaagttatttttaaacctaattatctttataaaatttaggacgtgtttggtttcagaaaatatatgtattcaatttttattttcataaataaatataaaaatcttatcttacatttactttgtttactattttccatgttctacaaattattttggttggtcctagcacaaatccttgacaatagggaacaaagtaagcataagatgatatttttgtaattatatgtgagaattcaaaatgaaaacagagaataattattttattagttcagatgatccttgattcatgtaaaacttttatcattaccatttaccaatatacaagtgccatgtggtatagtaataaatgtagcaccatatggatgagtgattcaaaattaatttttaaacttccgattatctgttcaaatttgtaacttcagttgtcttggcatcctgatttggtggctcttttgttttttttcatatatacaagagcattttgaagttgattatttcatttagaaaaggactctcatgttactcaaatgcttagcagcaatcagcagcagctacaccaccacgtccaatttgcttttagtgtttgcttcctcttccctctccagtcctgccaaaaccaagttcctgccctcactttctagattttctgtcaagcgtccgtgcttcctttcccaaactcgtcctcacattgccgtgaacaagccctccatgaacctgttgaacagactcgggtttggcagcgcaagagcaccagagaacatggattcatccattcctcagggtccagatgatgacataccagcaccaggccagcagtttgctgagtttggtgctggctgtttttggggtgttgagttggctttccagagggtgcctggtgtgaccaagacagaggttggttacacccaggggcttgtgcataatccaacctatgaggatgtgtgtacagggaccacaaaccactccgaggttgtaaggattcaatatgatccaaaaagttgtagctatgagactctgcttgacttgttctgggctagacatgatcccaccacactgaatagacaggtatatatgaagttttttattttttttttttttttatttttcacggtatcatgtaaaaaatgaggaagtctggtttctaattgatatttctagattttgctgatatgaataataggtctggactttgtgtattgtcagcataaatgatttttgttacttttggggtttctgtacaattatttaatgatgcattacttctagagttaaacattttgccaacacttttttgattccttgattgatttatttatagtaaattagtaattttggttttctctatgtagccattatttaacagatacatttatggtttgatatctagtcatgtctgttttgtaaattctgttttaatatgatattgtgttgaattttgggtcgcatcaaattgcaggggtctcttggtaatagttgtttaggttgtttttacccttctgtttgcacttggtgggatgtttataggggtgtaacgtaatagatggttaggataaattaagttggattaaaatagatggttcaaaaataaaccattagttcatttatgatgtggtagaattttattaaaaaaaaatccaaaccatccatgactttatatgataaagaaaaatcccaacccatccattaataatgtttcatgggtaagatatccaatccatccatttatttattttttcctcttgtcagcaaaaactctcttattaaaacatctcttcttatgagcactgttttcaaaagaacctgcaatgaaccccagctcctatgattatcattgatccaatatcttaacatccgatggattgtctcctttctttgtacattctgtaactccatttatcagttgcatttaggagttaatgcaatgatgattttgctttaatttcagtgtggcaatgtactagttccaacttcttatgttggacttcaattatacatggctctctagaatgacttgtgagcatccaaaaataagtttccatatggagtaatctatttcagtatttcctttgctacatttttgtcttgtcccttgtttcttttgttctcccctttcaatatgcattcttaataattttgtttcttgaattcactcttccatccaaatccatgcacacacgaacttttgaaaatatggtgactagttatgatatgcagcagcacatacatggattgtacattctaccgcttaagcgcttagttaccatttgatcttgttgtgtggcaggggaatgatgtgggaacacagtacagatctggaatatactactacacgccggaacaagagaaggcggccaaggagtcattggagcaacaggagaagcagttgaacaggaagattgttactgagatccttcctgccaagaagttctacagggcagaggagtaccatcagcagtaccttgagaaaggtggccgatttggtttcaagcaatctgcttctaaaggctgcaatgatccaattcggtgctatggttaattgccataagtgaattgccttcaaagatcaatgcaaccggttcttcagatattgaaagtccatagttttgttagtaagtatttgtaaatatatcaacaaagcttgtgcacactgtatttgaggttgaagatggatatagccatagagttgtatattgtcttttatatataatatggctttgctttgaaatattatctccacgacctttagttagtgttccgttggtgagaaatagaagggggaatggaagataagtattattataattttttatttgtttgatccaaaattttggagaaggtagttgaaattgttcactcaaaattggagagatttgaaggactggacaacttttacattaggtagactaaattatcttttaacttaattttatttgaccattttaaataattttctcctcattcttatgaactatatatcaggtgtatttcttttctgtcataatctctcttctgtcagtttctttcaaaatcttttcttttgaaagaaactgatagcattgtctatttcattacgttcccttatataaatttatttattgattagtaacacgacatttttttgtttttgaagtggggttggggggttaacaactgaacgtatccttttagttagagattaatttcttcaagttatagaaattactaatgtataatttgtttctttcaacgaagtagttttagttttttattgtctcgtttttttttttctttctttgaaacattagaacgtgatcttatgaaaaaggcaaacttcattgtggtgggaggttagggaatttggtggttaaagtaggatagaataaaataactaccatatttaattgtaattaattgtttgatgtattggccggatatggttatgttatctttttgtttaatctatcctgttaatttagcgtaatttttatcttttgaaagaaactgagttagaaaataacatgacatcataatacgtgtatctagtataaaaaataatatataatatataaaaatactatatataaaatatattattaggtataatatatatatatatatacacacataaaccttaacataaagtaaagtatattgtaaaaggtaaaaaaaaatattataatttttaaaaaatacaattttaatataaaaaaatctataattataaatatttacatgatgtgtaagatgtttgttagttaattattattttcatatctgtatatactcttgaaaattttgtttatctctttttaagatctcttttaaattgtctttgcattatttttttatcaaattaattttaattattttacaatttttgtacttaattaacaataaatggtacaaagtaataagaaaaaaatatttttttctcttgcgagaattggaaaatatgactaaagatgttaataattaaataggaattaagtgaaaagaataaaagattatgcattttggtaattttaagagtaattttaaaaaaataatacaaactattaacaaatttaacatgactaattaaattaactaacttatctaattattgtgaattaattaaagaatattatattaggtacaaaagtagtagttaattacttaaattgttttaaaagttggaaacgggtaattgttagtggtataaagaattaaaaggtgggaaacaaaacaaaaggaataaacactacaagaattccggctattacctaaaacccactgtaaatcaaaattaaattaccaacgacttacggtaggctacttatccctctactataatcttgttgatattttgtttatcgacgatcatgaaaaaccctaggtacgtaatatagtggactaaggctaagctcattgtaattcgaggaaaatacaatgtgttcttaatttggtcagtaatttaaccttcgataatagcaaaaaggaaaagaagttagtaattttagtaaaaaatacattcgcagctagctaattgttaatgcttaatggtggtttagagcagactaactttggtgaatcataagtttttctttgctggataaggtgggaaacaaaacattaaccattactaaagattaagattaagagtatgtttggaaatctgaatgttccaccacatcttagacattactaattatatttactagtactgtattatatgcataagttttatcagattattttcaagagtaaaacgtggtgaaaaaaaacgaaaaagctgtgtaaaagataatttgttaattgcaacgtggccttttctggtcggaatttgatcatatacaatattcatattcatttgtgtaattttgactgaatatattaaaatattttattgaagataaataaatattcatattcattttttttgctgaacaaaattataactatcggtaattatcatttcttttagaattatattattcatataaacaacttttaaaataatttctataatattttttttctttctcattcatttttaccatatgctgaaaaaaatagtataactatgtagtattttcttaattatataaatataatctatctttctaacgaaaaaatatttcatcattgcacgtgagtcctgacacgtacatagtctattattttatcaatgctgattatggacatgaagtccccactgaacgtgggctcttgttatttccaattttccatgcatgtagacaatatatgtacatcgtgatcctgcatcaattggtatttttcacattatatattttcatgatactataatataataatcgaaaaaaatgtctatattgttcgataaaattaaagcaacaataacctaaaagtttatatagcaaagcacttgaacgattttatgtttacatcaattaattttattgttcaaaacaactactcaggttacgtaaaaaaaaaaactattaatgttaattaaagataaagagaatactttttttgagagtaagataaagagaatacttaattaataagtttatgagtgtgtgataaacatcaaagaatattacccatgatgaggggaaacaaaaagatcttaacctgtcttatttcattcacatatttatacaaataaatgaaaaataataacggaaataaaaataaatactccatttttataaatatttaaaatatcttcttaagatcacatctttagcgaagaaaaataatcttctatcaaaggggaaaaaattcattaaaggaatattactgttaatttcatatatttattgaaacgaatcaaactaaatcaaacaacaaaataaacatttagaaaataatagcattcatagtaagtaataaatatatgcattttaaaatctattcaacaaacattttctttctgaggaagtccaaccttgctcataatttagaacaaaaatttaaattacacatgctccaaatagaaaagtaaaaaataaaatggtaaagaatcaggtataaattaaatttggacccatgatggtaatgccccacaagagcgacgagccaagtagaacctcacacattctgtgaatgtatcctttttctttcagtttctgcccatgtattggttggcacttcggctttgcatgcattgacaatgtgaaaattggaacacatatctcgttctaccttcgaaaaaatttataagaatttatatccaattggttgtaagtattttcttaatttacttagcattacttgaattaaagagaaaaaaagaaacctaacaatggcaatgaaaatgaaaatcaagttaggatgcgcagccattaaccatttttccagttgtttaatttaagatttttaattttaataagctatccagatctaattctgcattgaagtcgtaccaaacaaagaaaaaaataaagttatcacttattatgccactttatagagggttggctcattaaaataaatagttattaatcaatttcgaagcccatgtgagagcgtatttttttaatatggagcattggagcgcacgttttgtatttatcgacgtgacagtctctttggttgccacgtggagtctccctcggatgcctttttgtgtagggcgaaacagagtagatagtgaagtgtgcaagcaacaaatagatcagacactgacgacacttgctttactatgaagtgccctacacgaccgactcctcgcgcgtgatcagttttcaaataaacattatgcattttattgaagctgagtctcacatatccaagtgtcatgaaaatcggttcgattattgaatcagtcgaggtaagttgaggtagtggataagtgatttagtggtccaaccgatgaatcattaattgaatcgatttaaattggtatatattaaaaatttaaaattatatatgtatttattatatataaatatataactaatattatttgagtaaaaaaagttcattcatactctaaaatctaaaataactattgataataatccaaaatttttaaaaaaatccaaaaaaacacatataaaaaaatcacataaaaaaatcgaacgaacttgatccgaccaattgagtttgaccaaatcaactgtatgatcaatttaatgacagtaccgaaccatttctcgattcaaccgatcggaccagtcgatccgatcagatttcaataacactacacacaacaataaaattgttttgattttgaatttgaaaataactttttacatataaaaaataaaattacttataaaattcctctctttgcataaagaaaaattcaaaaacaatctcttttaacaaaagtaaaactgcttacaaaatttatcttccttatctttgcataaagaagaatcttttgaacatctaaatttttttagttatatgcatttggttcgagggcgatgtctaacgttggagacctaaaccgtgggaaagaattactgtccattagatctatatgctttttagatatgtttgggattatcataggtttacacacattagaacaattttcctccaatctcaaccatcttcaaggaccacgtcgacaagattttcatcgtcaacaacgccaccagtgttgtcgacgacatcgtactccaacaaatcgcttggaacttttgtgaaggaaggtacaaaaaggtgtcgtcatccgcgctctactacacctttggttccagttaattccaacaatgagatctaaatgggagattaatccttctaagtttacgccttttgattgcgtgcactgatcttcgacctggcgtcgatgacgcatgctagttgtcgcggatctggggttggcctatccatgaaagagtctcaaatttcgcttcaaatttgggggttttcatgaatgaaagcgtttgtgttttttgtacgattgtttttttgctttggattagtgtttgaggtttggttcatatttagatttcacttcggatctgcgctcagtggttggagaaggagagcgtaagaaaagaaaggaaatgaaaaactgaaagtaggaaaaaaaatgatgctgtgagaaatcatctccaacgacgactaatagaggtcgacgatgatgctaatgaagaagaagagtcattatgtaaaaaaaaaaaatagtaaaagaaaataaaaattctaatatatgcatgtctatcatatatctcaaaatcacttaaatccaatgaccacggttacttacgcacagtgggaaatctaccttactttcccactgtagacgccgggcatggaaaattgtacccttttcttttctggatgcttgaacaattattatcactgatctcttatctctactttctgaatttgacttgcactaagactttatcaatactatctgaaacgaataaaataaacataatattttttttaattcattactatgtatatctcccctagtttatataagaaataagtaaataaacattgtatactttttatatcaattatgagaaatgtaaatatcttttctaatatattaaatgttaatttttaaagccttttattttataataaagtttgttcacaaatatgagtttaactcatattataaaattattttatattatcaatcaattaaaaattatcattaatataattttaaaaaattataataaaattcaataaacttattatatataataatttataattaaataataatataaaaatactttacaatttcaatgcataacttaattattttcttttacaagatactggtgaatgtgatttgatttaaatataaatttgattagaaattttgatttgtaataatctttttcattttaaaattaacacattcaccagtgaaaaaatatttttaaattatgaataatatcattaaatatagtcacatcttaattaaaccattaattttgtgaatatttttaaataaaatttaaatttatgtcactaataattaatatgaaccaattagattgtttttaatgcagtgtgtatttgtttcttacgtgaaaaacaagaaatagtatttatgttagtttttctataaagtcttctctgttagctttaacaaaacagcatatgttacactttaagtgtttacgtgaaacacgacacatttgtatgaactgttttaaagagtctagttagagttagatgtaaaaagtggtaaaccctttaagtatattatcttctttgttttttgacgaaatcaattttatcttaacatttaacatttgttgtcataaactcagtttgtgaatttgacacctattgtggtattattttaaaattttgacagaattaaaaaatagtctgtgaagtttatatttcatcatttatagtaagtcagatattagtccattatattgtcttcaatggagtatcaaattgacaccttaagtgcctttcaacacacggaataaccttcatatcttagttaatatgatccaagttttgtgctctcatatttgtcgcacttttaccctatccgacttatattatgtggctactatatatacttttaagggttgaaaaagctttggaactcaatagatttctctaactaaagtgacaatgttcacgcctcaccagtttatcatttttcattcgtgaatgaattatcctttgacaaaaattcttaataacttatagaaatagataaaattatggagttgtgtattttttttaacagcagaaaatttattaaaccaagctaagcacaagatgtgccaaagctataaaccaccagagtacaaagacagcttttgccacacatatacattattaatcaatcataaataattttaaatataaatatatattttacaaaaaaattgtacttttagtttcttttattttataggcgacgataccatagtgttatatttcaattttcagacttgcagggaaaaatgaaaaaaatcaacaggattttttctttcaaatttggatttctaatagtttttgtttctaatttcattgattcctgttagatgtttttattttctgatttggccaatggccaaaactgacgatgacataaatgtttgattgcttcattaattatatactcattgtctacgagaataacagtaaatcgaatctctatgatatgaaataaatataaataaatgaacaaatccacctcttttttaagtaatacgaacttgtaattttaaactttttttagaggttgtaattttaaaccttatcatttttttgcaatgtttggattatttcaaagtaaataatatacattccaatttgactaaatgagcaataagtaaaattgggtttagttttttttttaacttttttctttgattcacaacgttgaatcacttttcatcatcattttattcaattaggttaatttaaaatttaaataaatatttctaatgaaaatttaagtatcatttcgtattcaaattttaccaatctaagtctatattttattttataactaatatttcaattagtacctgcattgtataaaataaatatttattttatataacaaaaatttatagtgaataaatacttcaaatttataaaaattattttaaaataaatattcttaatataaaaattatattttaaatttatgataaatatttatagtgataaaatattattttaaattaataataatttcttttacaaaaaatattaaaattcaaattataactaaaaatattaaaaaaaagtcaaattaaccaaataaatggtaaaatcaagtttttattgagtgattaatttagatactgtatttttgtcatccgtatcaatagaaaatgtcaggagaatttacaattactccttgacatttactcatttagatattatatatctgattttctatattatgtaaacaaatattattttctctatattatattaacaatatcttaaatgaaattatctgttaacaaatattaatttagttgataaaaaacaattaaaaaatatcctaattcacacaaaaaaattaataaggaacaattaaaagggtgtgaactctaaaatcttgtaattatgtttgaaagtaataaacaataaaagataaaaatgaataaaattgatttgaaatgtaaattgatccaatttttaaaataattatatttcattatttaaataaaataaatctttcttgaactcatcttaaatatcttttttcacatataaattaattaatattttaaagtcattatccttgaaataaatcctaataaataaaatgtaaaagtaaaagaaaccccccaccatccttcgatcattcaaatcagaacgtctcttccaccagcagcctaacaaacatcgtagcttataaaccaagtagggccaaacgacatcgtataacattttcccgcgcgtggaatcatgataactgatagcagatacgttgaccgtataaacatacggaaagacgtacacctctttgcgtatgtgtatttgtattgtcactgtgttcgtccttttctcagcaaaatctctgaaacagtgaaactctccctctctcttctgtactttcctcgtgtcctctctctcacacacacacttcacgaactccatcactccaacgacacacagattctatctcctctctctctctcacacaccacacacacacactctctgtttccattttatctctttgggccattcattctcgcaagtaactcttgtttgtttgattaaatggctgagactcgccggcgacgatgatgttttccggcaaggggagttttccggcgggcattgcttcgaggagcgtgaacaacccttcgccggactcagatcttgaaccggcgaagccatttctgcgacggaacccgagaactccggggacacggttgaggagacacggtggcaaacggagcagacccgaaacccctcttttgaagtggaagatccattacgatccactcgaagacgaccagaagtcttccgtcgctgggtcccgccggagaacgtgccggagcgccaagaagcaagccgaagtcgccgtgtcggcgaggagactagccgccggactgtggcggttgcatctgccggagacggccacgggtgatggccggaaggggttggaacataaggtaggttggaacataacttgggctactcttcttacactctgggtctggacctaactcagtcgcaaaacctagtttttgctgcgagggttttgctctgcttatatacactgttttgcctatgacactggtcaatgtgggatctcaaacgtttacccttttgtttttttctttctttctgttgtttgagatccctagtttttcttcgttcccgtgtgagtgttgttgcatcttgcatgtgtttgttgtttttgatttaaatgtgattttgcagctacatgctactatgttacttcatctactgtattgtaggccacccctcatggagaaaaaagaattaatagtttattgttggggtttatttattttcatatgatgattttgttgttgcttgattttgaatcgtgggtcttcagattctatccttggttccttgtcattattgttcactttcctgttttggtgttagagttaggggttagccgattaggctttctatgaaattaaaaatagctgtcttttgaagatacaaatgcttttgtttttttagttttctcgcgagtgatgtagttctagtggaggactaattatagtctttgtaatgattggagaaatgagttgagttgggtttgtgtttgtaaataattatcgttatgttgaagatttcttccctaaacgcaaacttgtgttcggagaaaggaagaatcagttgcttccgttcgtgctgcattaaatcatatccatccagagtgcattgaatattgcgtcttgtttggcaaaatgtcaaacaaacatgctgtgtaataatattggcttgtatgaacttatattcttttgtcagttttgtgctttttgagagtaagttgggactttagttgagtcttccttttatatgagattctgttatttgttatctgtacattccagttgaattagagaatgattatcttccatgcactttattattgtcttcgtttgtagatcaatgtagctggtttacaatattaatttcataggtttccatttctcattactgatcactgatgacacttatctgcagaatggaattggtcacgcagggctccagtttctcagtcatcctaatggcatgacccatggttctgatctgaagaagaatccatctcaaagtccccgttccatatttgggacaaagaatggacacttctgtgaggtatgatttttcttactacttcaatatcaatataatataaccattaggagttttacagctctttggtattgtaattgaagattattgactgaatgtcatatacacataataactcaagttaaaactgcaacctgtactgcacaatgatcccaatatcccattgctcggtcatgcaattacctgttttaatcatctttgtgaaaatgacatcaatcatctaattattaagttatagatagtgacaaactataatcatagcaacgtgttgtttatgatttcatattgtggaaatttttagtaatatttcaaaggcctgcccatgcaaacacatgcatattatgggttgataccacccaatttgcactttgaaacaaattatgctcattgttgtattgacccatgctatgtataacagtatagagatggcttagataaaacatttttcatgtaaacctacatggtgaaattagcttttccaatgtctatatgagcaaaagagttttaaaaagtgttctgcttctacactaaaagtgaaagagcagacaattaaagtgctaattttaaacctactttatgctattcagcctgaacgtttccagcttcccaacaatgaaatggagggtgcaacaaaatggaatcctttatgttcaaaaacatcagaggaagcgcagcatatctacagccacatgaaacatcttgaccaaaaggcaagtgctgtatctgttgtatctgctctcggagctgaactagagcaggcacaaacacgaattcaggaacttgagactgaacaccactcctccaaaaagaagcttgagcattttctgaagaaagtcagtgaggaaagggcccaatggagaagcaaagagcatgagaaaatccgcgcatacattgatgacattaaagcagagttgaatcgagaaaggaaaaatcgccagaggattgaaattgtcaattcgaggttggttaatgagttggcagatgtcaaactctctgcaaagcgctacatgcaggattatgagaaggaaaggaaggccagagaattgatcgaggaagtgtgtgatgagcttgccaaggaaattggagaagacaaggctgaagttgaagcattgaagagggaatctatgaaactaagggaagaagtggaagaggagagcaagatgttacagatggcagaagtatggcgtgaagaacgagttcaaatgaagttgatagatgctaaagttgctcttgaagagaagtatgcacagatgaatagactcgttgcagatttggaaagctatatcaggtcaaaaagcacagagccgaacacaatggacatgaaagaggcacagtcacttcaacaggctgccgctgcaatgaacattctagacattaagggattttcatatgaaccccctaactctgatgacatttttgccatttttgaagatgcaaattttggtgaagtaaatgagagggagattgaaccatgtgtttctcacagtcctgctagtcatgcctcgaatattgacatggtgagtcctgaagccaatgcaataagtaaaggtggcattcagaggcgttctgatgtatttttggatgataatggggatatagaaggagatgaaagtggatgggagactgtgagccatgtcgaggatcaaggctcaagttattcaccagaagggagtagccgatctttgaacaggaatcaccgagagagtaacgtctcagggagaagtgtacttgaatgggaagaaactgcaggtgaggagacaccaataactgaaataagtgaagtgtgctctataccaactaagcaagcaaaaaaggtatcatccataacgaagctttggaggtcaacatactcaaacaatggggacaattacaagataatctctttggagggaatgaatgggagactttcaaatggaatgttatctaatggtgtcatcatgtctcccgatcatggatcaggtaaaggtgggctgagtccccaagaccttctataccagttgagtcccgagtcaggaagtccacatgcacatcaaggcatgaagggatgcattcctcgcactgcacagaagaatagtttgaaagccagacttatggaggccagaatggaaagccagaaggttcagttgcgccatgttcttaaacagaagatttagttttgggcataggcattgcacagattgccaacctgtaaaattgataaatgattgatgaaaagcagttcattttagattgtgagggtacaaatatgctgctttatggaaaaatctgctcacagtgatgaggggtcatgaatagatgcacattttctgcctcattctagtttttatttcagttcttcattatcattcatattaagctttaaaagcagataatcttctcattcccttgtgctaaattcctcaaaacctgggatatcttgggaaatagctcgctttgtcatctgtgattacaggccctgcttcattgggtagggtcttgagaaaattatgagaagcatgtagcatgtgttgtactttatcatgttcagaggacaaatgtgatgggaaaaaagatcgtcatataatatagatgatagcattatctactcaagattttgattttctatcattgtgtatgtcgcttaggatttgttgtagattgtattttaggaggtggcaaggatgatttgtggtaccgggacaaaaaaatataacttaatacttactctgggaccttttcctctttctgtttgtctcctttattgttcattttgatagttaatgttgtcaaagtataaaaaaaaaaaaaaaacaatgaaattgaaattagcatttttcctttgtttgctgattataattaagtcgaggtgataattaacgtaaggaatgttttaattttatgatgttacacgagaaggaaagctttctacctttagaagttttaattatgatgtgttcaattttagaggaaaataataaaaataatttttggatataaagttttttgtgaatgttaatttgtgaataaatcagaatgattctttttcactttaataggtgcgaatgaattttttatataataattaattataaagttattaaattttatcatggtaattaaatacatgtattctcatgtttatcttccatagaagacaatgctacttgaatcttatgcaggataatttgaatttgaacgttcatttttttttacaattaaatttgtttaatcattggttttttaaaagaatatattttagaggaaaaaaaagaagatttaattgcattcttaaagaatgtattgaattatgattttaaaagattatgtaaaaatgttataacttaagatatttaattagtttttttggtatcataattgtgtagtttggtcgtttaaattttaattgtgttaatttaatcacttaaattttcttcaaattataatcatatccttccattttgattttattaaatgtttattgaaattaattgctataacaaattaatatttaaatacattataccatctgaaaaacataaaaatgtggtgacctacaaagatagtttgactgttattgacttaattttttattatgtttgtggttatttttataattataataacaataaaaataatgccttttatcctgaataaattaataagctaaatattaaataaaatctgaagaaaaaaattccttttatcacgttcacaacatttttccagcaaaagcaataaaatcagaataaaaaagaactttattgtaaatgaaaaagaaacttacagaataaaaaaatgaaacttacagttgattcaacaaagtcagtgagttatgtaaatcttgattctgtcatataaaaaaagaagacagaaaaaaagagttgaagacggttcagtcgcgcacccgcgaatcagaaatttcaattccctccatttcccccccaaattcaaatccccaaaccctcccttatatacattacatacacacatctcaattcaatttccatggcgaatttcgaagtgccctcattttccctaggtctcgacgatacgcccccccattccccaatccatccacctctttctcccgatcttcatgtctctgactccgactccgatcccgaatcccgacccgacccgccgcgccccctcctcaaacgcctccgtcgcgggcccccgccgccgtatctcgaccccgatgccgatgcctacgccgacgacgacatcgaggagttctcctctcaagaagatcccgatcaaggtcaggttagctaacacttcaaatatttcacctctctctcggctttttaattttaaataataatattaataatttccttattatttatctgttgtaatattattagggcatgcggttccatcggcatggaatcggaatcattctgtgtgtagcagctcgaaagtttcgttgaatggaagtggggttttgacccctcattcgtgtagcaactctttcagggataggaaaagaaaggtactttccaatgatgttccggcttctgccaggttagagacagggaagagtggcttgatgtttcccaagttaaccactagtcctctccgaaggtttcaattgattgattcggacaccgatgatgctgatgttggtgttggtgctggtgatgccaataaagttaaccctaacagtcatttggaacaagagaagaaaacatctgctgacgagaacaaaaatgaggatctgtggaagaatttttcgccggtgaagaatgtttctgttaataggtttcaattgctttcagattctgatgactcggatgttgatgtcggtggtgccaataaagttaacactaacagtcgtttgcaacaagataataaaccttcggttgatgtgaatggaaatgaggatctgtggaaggaatttttgccggtgaagaatgtttctgtttgtaaatttcagttgctttcagattctgatgattcagatgttgatgttgatattgctggtgccaataaagctaaccctaaccgccatttagaacaaaataagaaaacatcgcctgctgatgatctatggaaggattttttgccggtgaagaatgtttctgtcccgacgcctgccttcaatgagatatgtgaagagtactttcgttctgccaattgcaaggaagtgggtggtgattcgtctaaaagttttaatgagaggaatcctggggttagttctagctgccagagggatcaacaacgatgtgaatcaacagaccctgttcatcccgctcatacttattttttccatgaggatccgagaattcggcagttagtccgcagtcgcctgcggaattttaatccactaggtaccatcaacacagtgaatcagcaacctaatttctcacacattgattacatgtaagtcgtaacccatgttcatttgttgttttaatcttatggtaatgatttaaaaagaaagtgattgtcattttgtattacatattgttttggtgtattttgatttcaggggacaatttggtaatggaggagcttcaaacatgcagggagttcaaaatggttttattaatagctcaacaagggggaaaaacaaatcaagtaatttgaatgttgagggatcttttgatgcttctggaggctgggtggatcccaaaattgtttctccattcagccatggagaatcttctagaaagaaagcaacaaagaggaatggcactaaaaatagtgtctcaaaaagtaatagtaaagcaaacaaatcaaaccctgcgaaccaatcatgtgcttctgggggctgggtggaacccaggagctgcaccagtttgccaaaggatgcaggcaaaaggcgtgttcaagcaagtggtgaatctgctggtcattggtttacatcaccagaaggaagaaaagtatgagaaaaagtctttatttttttttaatgttattaagtaattaactggttaaatttatttacttttctcatgttagatgctggtcataagaagttatgcgagctgttttgctgttgtttaaaactgaaatgcaaaaaacccatacagtatgttacttaagatttaaataagtgcaatgaaattcaaattatcacattacataatgcctcttttttttggaaatattgttctatgatttgatgcacacgatcccatcattccaatataactatgtaacactagatagtgatactcaatctcccattgtttttgtaaacattcttttgacattaagattaattgttatatagggaccaattcctacttgatgtttaatggcagggaccaattcctagtggttttgaaattataggaccagaaccataattgagaaaagcttttaagtctattttgtcatattgtataaatctatcagaacctgattctttatccccccttgcaggtttatgtcaacaaaagtggggaggagttgacaggccgcaatgcttatagacaatatcggaaggtacatatacttgcataccattctgatgttttgttgtccttttggttgtgatgtagcactgaatgcctttgatgtttacaggagagtggagcaggattcaagaaatcaagaaagaaaaaaggtaccaagacgacaaatgccaagaagagaaactgaacacttgatggcaagaaatttattatccgcctggtccacatcccataatttacttgtggatcttatgactagcaataccctataggttcaatgctgttaaattgccctaaacttccggtatcatgtgttggatgcggacaaggaagccagccatccagcatgcagcatcgcacgaggaaactgaattggggtcttgttgcttagtgaagatttgattctaaaaaatcctggcaagtagatattgtgagcttatgcaagtagttctgtacagtgcacaaggacctaatgtctttggccatcatgaaattgtaactttagataatgtttcactttttttattaggattcccaataatgcttcgattccatcttgattcaccacttggttctgtgttattatgatagcttgttgctatgtcaattatgcataatttacttctggtgtttgtagattaaagtaatggaacgatagaaatgatagcaaattttaagtaaatgaagacatcaagaagaccttttattccgtctatcttgagcggaggatagagatgcttcgcctgaattgtttgggctatttttgttgcttatgctgtttattggcttcatttgttgatgtttaatgcacatgtaccaaataaatactgaagtttacagacgatgtaaacttaaattaggacataatatttgtgagcggaaacttaaattaggacatacgtgagattagcatacgtgtacagattcaaaaattaggaattttcactagaaaaatagaaaaggaatttaattttccaaaatccttgtaaccttttaattttttaataaaaaggataacaaaattgcttttgttaatagcgaataaagataaagccataaaggtggtcagtttcgcagaagcgtccaatcttcacgattttatttcatccaaaatgatagattgaatacaatttggaattaaattgaaaacttgttgacgagcataaaatctagcaacccttgacaaaaaataaactacttgattggttgtctacgtactaacttattggatggctttagtagaacgtggggccaaaaatgaaatatatatatatatatatatatatatataaagcagattgaaccggtaattaccaatgatttcactgtatttgaagttatctctttcaactccccggacggggaaaagtgttaaaaaaaagttcacgtttatcagaagctattaaaaatttaggccttcagttcattcatcgtcttcattgatgattagaagtattctgcttgtcttcacccttttcttttggaagtggagaacccttggatttcaatatctgttggcatactctgaaaatccatcaaaatagaacattcattagtttttgagataaaatcaatgtatataatgacaatcgagttaaattggagcaaatgaacaatgctttgcttcagaaaggggtataattctgacccaaatgaatgatcatagtaccctacaattatgcatctctgaaaaggaaaacagaaagttaaaatcatacgagtttaaatcttctgtcttgctcttgatatcacttgacaataatactggatcaaagttcttagggtaaagatcttgctgttgcctcgtctctcttaaccactgctctgctttattgcactcattgatgatctgaaaaagaaagttgtcacttaaaaactgatactaagggaaacatcccacaattatacttattcactagtttattgtcgtacctgttctttatcttggggtggaagagaatctacagacattcgatactctacaatgcaacttaacaaatctcttgtagcttgtggtcttgcttctgtgtctttataccgaaactcaattggatctaccagctgcagaagatggagattataagcaagaagtatggcggatgaaacatggagattggagaaacaaaagtaacctgttttagatcttctagttttgcagaataaacatctacagtttcgtcatcaccatcatcataaagccaatcctcagtcgctttcaggctcctagatatgtccttcctctcatgttcgcttgaaaagcttagatatgtgctgaatagctattcatacatgcaaataaatttaaataccagtacagaatgaaaagtagagcatacacatgaatacagctttaataaaatcaacggtaagaaaaggcataaggattcagattttaattctatatcggtatatcctatgcagatgttattacaaagtataacagcagaccatccccagcttcacaaagttttacccttacatttacttgagtcatgacagaagtcattaaactatatacaacagctttttctcattttgatatattcaatactttcatatttacatggcaaaatttaaggctctagtttttgaagaaggaacacctcacagtaaagatatgaaaaagaagaaaaaaaggatcatacaatgaacaattatctattttagcagaagaaatgtgtgaccgcttatacaatgtaattgaatcagagaagccagtcatgtctacatctcattaagatattgaatatgtaccttactcctcgtttcataaatataagactccaacgaattcttcttgtctttggtcagctcaattattctgtcctgatcggcgaactggagttctttttcttgagcttccaatatctcagccttggtcattctaccataaattttttcactcacaggtacatgaagccttctgttggctttacctttttttgtaccatcagcctgtaacaaggcatgatagtaacacttttattttcccaaaacaccaacatgaatcatatctgcaatcaaaacaatctccacaagataaaaatgtacatatacaacatcacagacattataaaaaacggttgcgacagactgacagtgaaagacatggtacagattcagtatcagaaataatcagataattaaaatttagccatataattgttcgtgttaaaaggacaatttgctagaaatctctaatatctgagatatcttccagtaaaaaaaggtgagcaggggagtgagagagaacaacatgggagtacttactgaatgatgtggagcttcacactttttattgatacaatcttctgggacattttcaactgtctcagaaacaggttcaacattcattgcttcagaatttgaatgataatcacctgttgtaactgaatcattcacatgatcctcgatcaactgaaagacaaaaatgtccatgtgcatagaaagatctctcagaaaactaataatgcgatatgaagagataaaattgaggtttcttactgtagctgattcaatactgataatgccatgcaaatttagttgaactcgaactttaattctcgccttacttccatgggatccaaggaaaggatcaatctgaatagaaatgacaaacaaatgcataagcatacaaaaacaaggtgtaggcataagcatacataacactttttaatcactggcacaaggaatggcagtatctcacaaccaattattataacttcattgtcctgtaatattgagatgtcttataatatagaatagacattagcaaatgttagccaattgtcattgaagatactaaatattaaatacagtcatttctctccatttgagaaacttagacagtagatatatggatggtgttagatccaccatatctgcttctcctaacattatgatttgttcaagcatgtgcacacctacagattctcatattgctatacctaacacttttacagcaatgacttcctttgagatcagaacaagcgatggtcagcaaggccatttaataatgaagtctttcgctccttcaagaaagggggaggtgtctattgcattgtcccaagattcaacaacaatagccttttacaaggtggggttggctacatggatcaaaaacaccataatgtcttatcataaataatgtctaaacaaaccatttaaatcttaatctttcttaatgatttaacttatagtttttcttcgtctcttactacctctaattattgaactatcttccatctaattcactctctttatttagagcttctacaagtcttcacatgtgtctaaaccacttaaggcacgattctaccatattttctacaacaaatggtgcctaactttctaaggaatcattcctaattctaccttgtgtgtctacttatccatcataacattcttgagttggcaatattgagctttattccttgttgagtttttaccactcaacattgaacttcaaacaacattgcaggtcttggatttgactcctctaaagtgagggaatgcattctaaagaataaagtgcatttataaccattgaataaaaaatccacggttgaaactatgataaaatacaagcacatgtataacaagtaatagctttatacataattgagtcctagacttacaattcaagagtaaaagctgcaattatgatgatgattactatatagtatatactatttttttttgtagaattaaacataccaaaacagtaaaatgaagaagatgaataagctcatagagactataccacatgcctttcatgaagcaccccaaagaagcaagaatagagagggtaataattaataaaaaattaataacaaagaatcacggacaagatgatctaaactccttcacatcatagtaaagttctaaagcaggcatactgtgaagcaactgattttcggagatgtcccaggtggtaattcatctggattagcatagaatgcttccagacggagcaaattactgcactgaaatgttagaattttaacacttggaatgggttggccttttgggaagagtacaccatccaatccttcacaaattggacttccatcacatgaaagtccaatggaaaaaggaatagaatcctggatctgaacaaacacaggaaattacattaattttatagagagtaatacatgctaatgcaaaattctataaaaaaaaaacacatgattaatgatatctatgaagttagatatatttcaattaagatagacaaattaaatgcagaaaataaacctagcacctatgtaacaactttgttcatttagtaattattacatttctaacctaagaatctacaaacacaaaaatctactctcctatatatacatatcatatagataggataagaatcaatgtgtttttttcaatattcaaacctcatattctttgacatggaaaataggactgagcattgcacactggagagcacaaccacgtgctacacactcacttgcattcagcgtgcggctcagttctctcttaaatagagaagttaataaattagttatagctggaatccgtgaacctgaaccaactaactcaacagaattaatcttttctactgtcatgccggcatcagccaatgctttgtagcagggaatattaaatttctccaataatcctgatgccaaattctcaaattcttccctcttgataaagcccttaacatctttttcatccatcaaacactcaatgctcagatcagccactgcatttgcactcaaaaccttcttcaacttctcacatgctacacgcagcctcctacatgccctggcattagaatacacgtcaatgctgtactgttccttaaatcttgctgcaaaatgactaaacagaacctcatcaaagtctctccctcctaagctactgtcaaaagcatgtgaaagtatcttcatttgaccagcctgaaatgctgcaatagagacctgagtatcacaatgacctatgtcaacaaatgcaacataaataggagctgcattgggaaaatctgttttgcaaactccataactaagaccagttgcagtgcaatcatggatcaacctcaaaggctttaacccaataattgctgctgcgtcgagatatgtttgtctctgtaagttggtaaagtatgatggaaccccaataacgcagtcagaaactgcggtcccaaaatccttttcagctatagccttcaagtgagtaaagagcattgctactatttgaaccggggaaaacgtgcgagtctccttcaagtatttcaagcgaatcagaatgccaccatccgggccttccgaagtttcaacggggagcaattttaaatcattctgaacatcagggtccgcaaatctcctgcctattagtctcttcacttgagatattgtggacttagggtgcatcatagcagaaacagcaccagctgaccctataaaccgttgcttctctccaaagcacaccacaccaggggtttcacgtttggattcatcattcaacaaaacatcaatcacacgttgcttcactgcagcaatcacacagttctcatttccaatatcaatccccactccactcattttaatttactgtgtccttcccccaaactacaaacaactaattcaatccaattcaccctttctacgtcaccaacaacaacccaaaagtcaaaaacttcacacaaagctggcccacaaacataagcttcacatttcacagggcgctattactacaaaaaagaaaaagttggaaacatacacatcaaaatgaaaactttatttctgcatcatggaaagcaatagaaaacaatgatataatgtaacaataaatgctttgaatgaagtaaaaaagttctgaaactgaggaaatgctttgaaatgaaaaaagaaactccgagagagagtaaaatgagataagccaaaaggaatattgagagaaaatggaagaaacctgattttggtgaagagggcttcgagagaaagatgaatggtgaaatgtagaagcagttggaggctgcataattaagttgtaatggcagagagacaaaatcgccacaccgcactcgctcaagccatgataataccatccctatccctcgtacaaaacatttgtaatggaaaacacaagctatcgtcaacgaacaaatttgacaataatcagtttaactggggtaaatatataaaattaattatatttattgttgttatttttaaacacggtttcaatattaataatgatatttctcttatctttcttctcatgttcccatcacattttttcacttattatttatgacatttttcatcttttactgttgtcatcacattttttttttcaatggtcaaatttttttttttagtaatttgagtttatttatgttgtgtgtgttatgtaaaaattggtgataaaaataaacattggaatcccaattaagaaaatacctcaagtctctaaaagagatctgataaatttaaattattcctataaagatttacatgagattatgaaaaatttcctccacgtttgtctccaacattaatttccgattctagtcttagaaaatttgttgacactttttttaatcttacacctatctcttgtacactatcatgatttattcatgtttttattttttgtcatacattcatatcaatattttcatatctattacttcccacctttatttttgttcttttaaatttctaacattaattatcataaaatacaattaaatgtataacacgataaaactttgttgcaaacattttttcaattacaaacaactttcaattgtatcttgtgattgatatcttaatttctctttatgttgtaatattgataaaaaatacttttttttaaaaaaacttgtaataaaattatcacagggagactatttttataatactttaatcatttaaatattcaacttttaacaaataaatatttaataaataattatttttataaaattatctattagttccacattaaaattgatttttatttcaaatgatagaaattaaacatgcatgtgtctttataatttgtgggttgcatgaaagcatcaagactttgtctggcatgaacagccttattatcacaattaagatactcaatattatcacagttaagatactcaatgcaaatgatttgacattcacttcttaatttttttcaattatgataataaattataactgaatcaatttgttttttagaactcaaacttttgaaaatcaatccatccaaaaaaaattacaacaaaatttattgcttttcaaaactcaacgaccactcactaaagaccgttggattgttgggttgacacaactattacttcatttctatgtgtattttttgtgttgatcataaaattatatgaaataattttcatggaagtaatgattaatgttaatatgttattgtgagtgcatataaggtgattatttctatttataattgtttatttcatatacaaaatcatgattcgaacttgtatcacttgattgagggatacaatttattataacttgtataaataaatagttgttggcatgttcttcttccttttatatatgtaatgagggtcgataatcttattcctttgatacaaggttatttaatacaatcattttaaataaaacttttaattgtttataaactttttaaaaaaatatttttttaatataattgtataattattttcaataaagatgtatacttataatagagggtaatttcattgttatcttttttaaaaacaaataaaagtttaattttcacactatctagcatttatcatatcattagtgtgaaaataagctatttgcttaaataaacatagttggtttaaaaaattgagagtttgttacttgtttaatcctaattaagttggacgaacacatttaagaggacagagactgtttttttattcttaacactcaagttcatgacttcaatcatgagtacttataatgaagtttcaatattagaattaaataattgaaattcagtactagtataatgaagtttcaatattataatgaagtttcaatattagagtttcctgagatttaactgaaagctccacatcctcaagcagttcgccaaggaaggggattgtttcagctatgaacactagatattcttctttctagttctccacaacatatttaacaattctgaggcccaatattttagctagcaatttttcactccgtgtctgcatcaaaacctgcaaaaaaccggataaagaaggcagaaatatattcagttgctaaggaatactagtatttgcggggaacaaacatatagcattcaagagctatacatattactgaatacccaaaactataacaacaaactaatgggctaaacacttcaacacataagtgaggcatggatgactacaaaggaccaaagctaacgtattatgaaatggggatgcaagagtacagaagcaagtttagatctttaaagatcattggccggtagggtaggtcaaaaccgcagggatacaaagcgtcaattgacattattactaaagtttgatcaaaatgacataaaagctacagtctatttacaattaaaccttataaagccagataaacatagcagaaaaggtcaactctaacatgactgaaaccctgttcagataaactattcaataagcacttacagaataaggaaaaaaaaaaagagcttaaaatgaattaagcttctctcataagttaaaatcaacttttatagaagttctgatttaggttctctaaaaacttgttttaacttgtgcacacgttaattttaacttaagaaactcaatccattttacctacttattttattctcttagaagttcttgttgagttttcccaaataggacatgattttactatgcttaggtgatgttgataagtagttgttagcaatgccaaaaatggaggtctagcaaaggaagttttggtaaggatttgctcgtttttctagtttgaatgactaatgttggaaagtccacatttgaacctgctggcattgctaggagcccatttgccccgtccaccttgttggcttgctgctgcatcacagctactgactgaatgtttacatgtaagaggagtggattcgttaaattaaaagttttggggggccatatctgtaatttacacttttattatggcctttagagagttaattacttctattgttagacatattcttaatctattgttaaaatgtcttggggcatccatgcacccaaactaatagggagaatagtagaaccagtcatattcataacagtgtttcccgaggacaacgatcatatgcatttcccctcaatgaaaaacaagatagtgaagccagtaagttaccagtatgtcagtatcaatttacttgcccaatcattaacgagtagtagaaaagaatagaaatcataaaattcacctcatgattcaaaggtttccacaaaaggtcagatccaccagtcactgccatttgaccgatgcacacaaccagtaggtcatcaacttccttcacacttagtatattcatgctgtcatccaacagagctggtggatctacaacaagttgtgaaacaagaggtctcaacaacatctgcagcaagcatgatataacagtcagtgagggaatatagcaagcaactatattactgaaggaagctgaaagatttaggaatattttattcctcaatggaatgagaaaacatgcaaagtatttttaaatggaatggaaaaattgccaattgatgcataacctttaaaaattccaataggatttctgtattcaaagggcttctgcatacactagccaaactgataatcacatgtcagaactgacagtgagacaaacttttgattttgctaacagatgccaaggttcaagtgatgtaggtatgtatataatatattagtttcgttatgcgccatttttagctatttttattttccatttcagaattcagttacttaatttcctggtctaatgtcatgaacagaaattgtgaaaaatcttgaacgcttggataaggagaaaaacatactgccaagtccagaaattgatgcattcatgaaggttgtctcatcttataaataatatctgaaaaatcatgcatatatgcaagttcagggaagtcctctaatttgtgttttttttaaactgattttactcaacaggcaacacttgttggtggcaaaaaccacaatgtcgagacagattatgttttgaaagtgcttggtcttgatgtatgttcagatatggttgtaggcaatgatatgctaaggggggtctctggtggccaaaaaaggagagttacaacaggtgatctctctcccctttctaggaatttgttacaattttctttgaaatttggctcttgtagtgatatgtgctcaagttaatctaactggattacctctttagtgtatcatacaaagaaagagggtccaaattcagtctctctatttttttccttctgtttttttaagatgaagttaatgtgaaatatagctttgataggatttaaggagatttcatttagaattttgtttttgactcctaagattggagagttacgacaggtgatctctctcccctttctaggaatttgttacaattttctttgaaatttggctcttgtagtgatatgtgcttatgttaatctaactgaattacctctttagtgtatcatacaaagaaagagggtccaaattcagtccctctatttttttttcttctgtttttaagatgaagttaattatttccacttgtaatatgaaatatagctttgaacaaaggcactaattgaagttaaaaattgtagcaagcaatgacatacttttgcatttcatatcgtaaatatcaattatgaatggaatttaataaatcaccaattttgttcccaaactactatcctctccttaattgtccctaaagtaataaaattgttcaagcaatccttgaagtataggatattcatcagtttaattagttcttaagttgatgcatttcaataaagtttaaggcttaagttgaaaagtctttcaatatttaagagattacttagtttttcttattttatcaaccattaaggagagagtagtatttcaaggatcaaattgatagtttactcaataagtaatgtaaaataacagaagaatattatagtttgacaacaccgctgatattattcaagatggtcaaggaatgtctttaaggtcgacctattggtgagcttttaaaaattaactaatgaagaagttatttttgtttataaaaaaatcgtctcatttttttcttttagaaatacttctagagaagttgatccaaacatgtcaaaaacatataaagagcaatggcgggagatccagggctatattaattatctataagaaaacgtaatgaattattgagctagagtacggacaatattattgaactaatgttattacacataacccataatcaatatttttactaaaaattaatttgattaattagtaagttagtatgagagtgagtaatatgtatgaacttcaaagacatctcgcatgtaattaatcaaagttggcagagatcttgaacctatatgaacatcagctccaattgtcaagtttcagtatctcacttcgatacttggtacatccaatccaacccttttgcagtcaaccacacaaataatttaaatgcaaaatcatatataaaccctaatgcatgtaatcgatatgagaattgttattttttttgtaaaaatatttaactctcttagcattccttgatggcagagaggagcttgtaattgtcttgttcattggttgccaaagcatccttgacgaggcgttcaagcggcttagcttcctcacatcaatctgctccaaaaccttggccttcttcttccctgagtcacctctgttgctcatatccaaagacggcgccatgttggcacgcttctgcgtcggcaacctcagcaatgcagccatttgaagctcctcctcatcttcttccatccattcggcattggaagcccttgcaaacgactccctttcggacgccattctttcttctctttctccattgtgggttcattaggtatttaatatgtttgttttccattccgtattttgttcattcggccctattgtatgatggtttgttttggtccctttctagaaggcaattttctttttaagtatactcatttagcataaatcaaacaaagggaaatcttccaatgcagattcaatgcacttcattaattttaattgttataaattattttaaaattcaaagaatcagacctagaagtattcaatataaatataaatactatacatgcttgtatattggagtgtggaagtagatactgggtaacttttattttattttatttttttttgatttgggggaacttttatattatatttgaactcagagaaatactttttatatatataccaatataaagaccaagaactaaaaatttaaaagatgtataattatgatagggtaatttcattgttatcttttttaaaattttaactaacatattttttttttaacaaacatgttagtatagttgtttgtagtcatttattgtaattttgtaacaaaaagcttttaaattatcatataaaaaaataaaatttaattttcacactatctagcatttattatatcattagtgtgaaaataaactatttgcttaaataaacatagttggtttaaaaaattgagagtttgttacttgtcatataaatatgcaaagttgattatattatagtagttattattttgttgttaatttaaaaacaaactcaatattaataatgatactaagtagatattttgcttatattataaacaatatatcaaaataaagttaattgaagaaatatatactatattttaaattatataaaattctatttacttaaatttttagttacaatactttttagaccttaatagaacagttcaaaacacctaattctaatgtttttttttattcttagcactcaagttcatgacttcaatcatgagtacttataatgaagtttcaatattagaattaaataattgaaattcagtactagtaaaaaagttattgaacaaagtaagtaaaaataaaaattgattggagtaaaataattagtgaagggtttgaataatgttcaaatcttgtactgttatggctaatttaaattggttaattaataatagcaaagaataatactatggacattttaaaaaaagaataacatacgtaaagtatgctagctaaacttatattgcaagtattttatttatttttttatttacgaaaattaaaaaatatgtataaaagatttataataacttatgtatcattttcaatcaaaactacgttcttatatatgtatcactcatgcaacttatatatgtatcactcatgcaaccagagtgtttacataaaaaaaaaactctctaatgtcttacctaaccctactcatacaaaattggtcatttataacctcacttggatcggatgttaatctactcattaatatccatttatgccaagacatcttatgcaatgtgtgttttttcacatttgaatacactttgcatgagttgagagttgagaccaatattattcattttttttgctaggcaaagatactccattaatagaaagactggaatagagcacaaggtgtacccacatcaaactcgaaaaaacaacatacatagataataacggaacatactcgaagagtatcacaagatcaatacatatattcctatttcacactacctgctactctatatatcacttttattcagagttaaaaactaaaatttaagaattaaaaatttagttaacctctactttatatatcactttctagtttattcaagactgatcgacaatgttttgtttttttacctcatttatttttttaatgaatagctttgtactgaaaaagaaataaaacaaactccgaaattaatcctaaatttggtaaacgctgttgtcggtgttgtaatttgtaacccagttaaatccattttagagataaagtttatgtgatctaatattatgattttgttattttatcattggatccattttaaatattttctaattcagtacaattcaaattacttatagagaaagcccatcaatatgctgattggttttggctaaacatgaaatttcttcttcatctctttgtcaagcatgagagttgtgtccgcttcagctacctttgttagatagttgttgattcttcttgttgtcttttatttcatccactaataattattatcaaaattatatgaataacacaattaatttatagtttaattattaaattaaaatttattattataaaatttattatgtaaaattatatataatattaaaaatttaatgttatatatcaatattaactatttttaatataattagtttattagtttaattggagtgttgtgttcaacctcacaagttctagacatgtatgaaacataaggcgaatcatatccataatcacaatagtatggagggaaaaactttatacacccagaaaaagactaatacaccattccagaacagtgcatttccaaaaataccctcacttttattacacttcatacatacggattcgtgaatctgtaagattcttacggatttgcgaatccataattttttttgagttatacggattggacaatccgtatgggccatacggaatctgcggggtcccaaatgaattggcttattcaaaaaaaaccccgttctttggaagatctatctcgtgtctagtactgcatggttccaccctgcaagaactctgaatcattctcttgaagctcatgctcttcatcataaatgatccgcttgtcccaaaatgacctggcccaacagggaaatcccaattcattgggcctttcaatacaatcaaatagaaagccccaagggcgccatattctaggagcccaaacaatgtgattgaaaaaatcctcctctatctgttgtgggtcgaggactccctccccttcttcaaactccgattcatatttttcatagagaaatctctgatcaacgatagaataagatccattttgaatcatatttaagggattccttggttcggaccgaagaaacaatgtcactcgatccttatcaaactcactgcaatctttttctgtacgtgaggatcccaccagagcgccttctacttctaataggccatgaactagatcagaattattctcaacgagtccataagatgtgatcccatttttttcatcaggtctgggtagagaccaaaggtcttgagcgaccgatctggcagaacaactcaaaaggtaaagaagtatcgttaatttattcatactcgttccaagttcgaagtaccatttgtatccgtatggcccatacggattgtccaatccgtaagtaagtttttttttaagttaaaatatatttttccaaataatttaaaacaatggcgcatgtaggtctcttattaacgtaacgctccaaccaactgagctaataggccaattatgctaaaaaccaattaatgttatacatgtaacactaaattttttaatgtatatttaatacacgtataagttacataataaattttgtaaaattaattttgatttaataattaaagtattttttacatataaaaatcatagttttaaataaaaatcataattttaataaaaatttgcaggactaataaaaattatatttgtatttacaggttaaattaaaaattatatctgtagtttattattgattttattaaacttatgatttttatttaaatctatgatttttatatgtaaaaaatactttaattattatatcaaaattaattgttacaaaatttattatgtaaacttatacgtgtattaaatatatattaaaaaatttaatgttatatgtatcaacattaattagcttttagtataattgatctattagctcatttggttgaagcgtcgtgttaataacctgaaggttaaaggttgaaacttacatgtgtcattatttggaaaaatattttttaacttaaaaaaaaaaacttacttacgtaaggttcatacggattcacgaatccgtaagaatcttatgtattagtcttttgctgggttataaagtttttccctagtatggaggaaaataaaaatgtgtacaaaaataatggcaatggattaatcggaccagcccaatcattcatcactcggcccattacgtagctcatcgtcgttcacaaaaatgaagcttaaccgccaacaattcctgcactgcaaactctttctgccgcaacaacacgcaacacacaaaccataaacctagccccaactttccttttcatcttcaccttcaccttcgttttcaagctacagcaatgagaaggccgaaatcgaaggagtttcgcaagcaacagcgagtttcagaggaggaagagataagcctcttgaattcatggatccagtttcagccaccggactccggttcgaacccaatgtcgctgccgcgtctccccaaaaactcccccgttggccgcctcgaagataacacctactcgcgctacgccggcgcgtcacgctttgatcaatttccactctcgaagaaaaccaaggacgccctaagagagtccaagttcgtggccatgaccgacatccagagagcgtctcttccccacgcgctctgtggccgcgacatcctcggcgccgccaaaactggctccggtaaaaccctcgctttcattatccctgtaagtgcttcatttctcagctccattctcttcggattagggtcccctgtatttctttttatttaactaatacaaatattatgataataatataatcacaagattagctcaaagtgagaaaatatatagtaaatagaatatgatatattgaattgtgatgtttatgcttgttattatttgtttatcgtggtttctgaatgcaaatattatgataataatataatcataacattttactaataagtgtggaaaatcaacatcgaaagttcaaagccatgagaagctgatacgtgtttgggcaaggtcattgatttaatatgtagtgggtgaatagatggtatattgaattgtagtatttgtgcttattgttatttgtttatggtgaattttgaatgataggtgttggaaaagttgtatagagagagatggggacctgaagatggtgttggcagcatcatcatatcgcctacaagagaattggctggtcagttatttgatgtgttgaaggttgttggcaaacaccataattttagtgctggccttctcattggtggtcgaaaggacgttgacatggagaaagaacgtgtaaatgagctcaacatattgatttgcacgcccggtagactgctgcaacacatggatgaaactcccaattttgattgttcacagacgcaggttaatataactttttttcttatatgtgatagattaacctcaatctgactctgaaattagagttacaattaagttgtttgttttatatcactatctgtttcctcgtgtctgtttttaattgtacttgggtatgtcaagattttctatccttaacaaccttcagaaaaatttgcttccatgcctaggtgatttagcaacagtggttgaagcagagtataggtgccgtttaatttttatatgctttaggcccttgtaaagcataaattttttattttgtcttccaaagtacgtgtttatttgggtcaaaccagaaaacagatatgtatcattagatttgatcaatatagctgatggttgggtggacttcccggatataggttttggtactagatgaggctgatcggattctagacagtgggttcaagaaggaactaaatgcaataatttcccaactaccaaagcgtagacaaaccttgcttttctctgcaactcaaacaaagtcaattcaagatcttgcaagactaagtttgaaggatccagagtatctgagtgtgcacgaagaatctgtgacttccactcctactctgttgaagcaaattgtgatgattgttcccctggaaaataagttagatatgttgtggagtttcataaagacacatctacagtcgaaaacacttgtctttctttcaagctgtaagcaggtaactccaactccccttttctgtcctgtttcaagaaattctttttcttgttgaagggaattgtatgttataggtttctattacaattttactgtcatgccacttgaaaagttgcaccctttgatgcttagccaatgcatggctattggctagtcatcattttcaagattttttgtgcaattggagggaatgtagtttgattttatgattgaaacttgaaagttgtctcattagtttcatattcaatggccaagtaaataattgttttgttttatttgtagctacatgatgaagttcacatgcgtagaacttctgttatggttttcagttgcgctggttatggttattgtaatgagaaaatttttaaaggatttttaggatgaatttttccataattctttcatgtaaacagggaaaatgtttaagatgtggtttttggtgcaaattccctcttttgagcttgactatcttccataatgttcacatccctgcttaataggtaaaatttgtctttgaagcatttaagaaactgcaccctggcataccattgaagtgccttcacgggaggatgaaacaggaaagaagaatggcaatatattctgagttttgtgagaagcgctctgttctcttctcaactgatgtggccgcaagaggccttgattttaataaggcagttgactgggttgttcaggtgagtctcatcctgcttttggtttcctgtcttggagcaagttttagggctttgtggtggggtgttggaagcaaaaagcttgtttttatgttcagtctctcacttctctcttgcatttgtaggtggattgtcctgaaaatgtagcttcttacatacatagagttggtcgtactgctcgatataaatctgatggaaagtcagttttatttctgttgccttcagaaattcaaatgctggaaaagttaaaagcagcaaaggttccagtgcattttaataaggtacattttccctgcaaattaatagtatgcatgcaattccaattttcatttgaacatcaaggtgtcacttttaaatctgcttcacttcagtcttatgtttgtctgacatttgctttccatgtttttgcaattgttgattattcagccaaggcaagaactactgcaaccagtttctagtttgttggcatctttactggccaaatacccagacatgcagcatcgggctcagagggcattcatcacatatttgagatccatccatatccaaaaggataaagacatatttgatgttatgaaactacctattgacgagtattcagcatcattaggtttaccaatgacccccaaaatccgttttctaaaccagaaaattaaatctaaagatgtgacaactaaatcaactttagttgagccagaggattcagacaaggaaactatctttgaggtttccaggaagaagctagacacagttgctttcaaggatgaggaaaccgaaaatgatattcttcagttagcggatactgcaaatgaaggtgaaattaagtcatctgaaattgaagaaataatgtacgttcccatatacatttttacagtggtacagattaaaaaattaggctgctttctgataatgctgcattagtttttttatatatgattatggcaaggggctacactagtcttctggtttcaaaattgctgagacaaattgatatttgaatataacaccttatgatgtggctaatagaaaaaaaattcaaacttagtgttgggtataaagttggatctttcatatttcttggcgggagccattcatctggagctttgaatttcttcctccattattattcttaccaatttagttctttcctatgcagaccagcaactcgtgtattgaagaaaaagaaactcaagattaatgtacacaggccacttgggactagggttgtatttgatgatgacggccacacacttcctccactagccaggatagctgacacacaaagtggcaaagaaatgctgctcgatccaggtattccatacttttcaactgcaaactgaagctgaaggtgaaattgttgcttgtacatgtgtatacgtgtcatttcgttccttgttttcatagttttgtgaaaataataaaaaatgttttaaaatgttaaattatagctacacacttgtttaccaattggaaaacccttttgtattttctgcaatcatcattgaatttgagaacctggctagatctcattctcatcagatcactatataccattttggtcttcagagcattgaagtagctaacttacatgtatgttcttacttcataagcatggactatttgtacattttgccacatcatctttatgtcttgatgcagaacaaaaagctgaatactatagaaggatgcgagatgatttgaagaaggctgacaaggaagacaagcttatagagcgtcagcggcttagagaaaaaagaatcaagcagaagttgaaatggaaggctgggaatgcggaagaggacgaccaagatgatatatctgggtcagaagtagatgagactgtagatagacggcataaaaagagtaaaatatactttgatagtgacagtgatgagggtgaaagaaatgaagtttcagggaatgcaggtataactaccggtgcggttacgttggaggagcaagaagctctggctttgaaattgttaaattccatgcactcataggatatgcgtaattcagctggacattttgtgacagcaaaaactggtgaaaagagagcaattcctgaaacattttaggagttctgttaacaaaaaattttgatctcccaattttttctgtcatctctttcaagaaacgtatacatagaatcaatttactgcttttatttattttaactaaaaaaaatgggactaaaggacatccttgtgtgtaccaaacacgatattaaatattattaggagatattcataatagttgtacttcaaaatctgaatcgtttacaggaaaaaaactagcaccaaaatggtgtctttgccccctgttagttagagaccccaatgaagtctatagaaatgtcagatcaaatgttttgtggaaatgggccgagtttatggtctcgtacagtcgtacttattccgttgcattgtataggcgtggaagaaacttgagtgttctcccgttgcttagactgcgttttggaattaagacaacaataaaaggatatggacataatttcaattatttatgagaaacaagaactatcaacgggagcttttttggtttgaaaaaaaaaaaacttttggatttctgtttattacaactattataaataagaacttaattattacaactattaaattaaattaagggtttagattaaatacttaattacaaatcttgtcattgataatattttttacaaattttgtgtattttcttttaaatggagatgatagtaatgacatgactggtttgttgataagaaaatggagaagaaaacaaaaactccatccatccatctggtccagtcaacccatgttcatgtattttatttcagcttgacattgaagtggggcgcagcaaggaaattaagcaaaaccgcgtagggcatcgtgttaatattttaaatttatgaaagagagaaagagaagtagggaggcattggccattaggaggagtcaacgagacaagcaagccaccttctgctacttctcatccatcatgtcgaatgaactcaaaaactacgatgtttttctcagttttcatggcgaagattcccgttacaccttcactggtactctctataatgctttgcgcagcaagagaatcaagacctttttcacagaacatgaatatgatcgtaaactacacactcatgacagccaaattccacactctactcttgaagcaatcaaggaatcaaggatttcgatggttgttttctcggaaaactatgcatcctcctcaagatgtcttgatgaacttgtggccatccttgagtgtaacaggacgataaaccaactggtgtggcccatcttttacggagtgtatccgtggcaagtaaggcaccagggcggtaactatggagcatctatgtctacattagaagaaatatttagagattccaatgagagggtgaagcaatggagagcagctttatttgaagtcaccaacttgaatggatggtgttaccaaactgggtatgcttaattttagttgattaagttccattattaatctctacaactgctagcatagcatggcaccacttctttattacttattgtatctgtaatctgctgaacagtatgtctgatcttctaattatcgttttagaaagtcactttgttttgtttaaccgagagaaatacatgtgtgctgtaaattaaaggttctgtttccagtttcagtgtagcagtagcaatctgttctgtgcatacatatagattagtcaagcttaagtcaacttataattctgattaatagaaacaatatggttgtccatgctcgaatacccctggtgaattaaaaagacttgtgcttttataggaggtaccagtatgaatatgaattcatcgaaaggatcgtggaatcagccgtgcaagccttgcccggatatgatgtttttctgagttttaccggagaggatacccgctatactttcacaggttttctctataatgcctttcgccgagagggattcaaaatcttcatggacgatgaggaattggagagtgggaaccaaatatcacagaagcttatgggagcaattgaaagttcaaggatttcaattgttgtgctttctgaaaactatgcatattccacgtggtgtcttgatgaacttgccaagatcattgagtgtatgaagaccaacaatcaaatggtttggccaatattttacaatgtgcaaaagtcggatgtatgcaatcaaacaaaaagttatggtgaagccatgactgaacatgaaaaaagatttggaaaggactctgagaaggtgcagaaatggagttctgctttgtctgaaatcaacaatttggaaggagaccatgtcaaagaaaatgagtacgtaatgcttttaattagttacttaatatatgcttccctcttaagtgatattgaccatctatgaaatgctaaacatggcatagttcttgtccgagacatggggtattgtgtgttgttttgtttggagcagtttttgtattttgtacggcaatctgttagtgagaagattaattagtcgagcttaatattgttgttttattgacataaagtctgattaggagaaataaagtgaacacagcggatgaatgtcttaaaagaccttgcacttttgtaggtaccaacatgaatttatcgaaaggattgtacaaaaggtcattaaacttgaaggtagcaagcatatagcaaatcctttccttttatccaatgacagctacgaggaagaatgagtgaaagtcggtcaagtatatgctgtggagctgtgtgactaattgattgtaacatcaataactgcccttgaattcagttgtgcctatcaatgttgtttttacatccagttcaattcctaaggtttattgtattccttctaaatcttgttcaattctcgaggtctgttgtgttttttctacatcttgtttcaatgttttgtgttgattagataaaaaaaacaagtggtactattttgttttgtcatattggcattaggtaaggcaccgtgaaacaaaatttaaacacatcgccttctactcacaaaaataaaaacagagtatacaaaatctatggtaaggttaaataagttttcatcattcatctatttcagaattccatttttaattctctcaatcttctttatccaattttagtctctattttttgaagtaagtttagtctcccacgttaaataaaaactatcaaatacttatatgtccaacaaaattacatgtcacaacacacatgatgtaatcatgtgacaccgatgtgggtgatactaacatgtttagtcacatggtatcatgttttctatgtctttagaaatttttgaaatttaaattttagttcctaaaaaattatcatctttcaattttagtcaatataaatttgttttatttaatttaagtcctttaaaaaaaatttagtttttaatccttaattaatttttttaatcttagtataattatgctttagtgatttgttggtcatgagttcgaatatgtaaaaagtttatttacatatgcaagagtaaggttgtgtacaatatctttttccttatttttgtataacaaggagcctatgaacaatgtgatacataatttttttttctagtttaggtatttctagaatatttaatctcttcattattcaccttggtatcacaaatatcatcacaagtatgttcaaaccattatttggttaggtcctacattttgtcccaattttggattggatttttcttcctacaccagctagtgttcccatacacccaacaataaaatgaaaaactgaaaatacccttccgtaaggttcatacatattggccaatccgtatcctttgttgtcgtcaagctcagtgccctcccagcctttggccaactcaccgacatcgtcggggtccccacctctaaccgcatggaagagaaggcccactccctcggcatccccctctctatcctcgaccacaatccccacctcgatctcgccatcgacagcatcgacgaggtcgatgaggcgatctgtaatccataagattttacgaatttgcaatccataagattcttacggatttttcaatttgtatgaaccttacggattgtcaatccgtatgaatcttatggaagaatattttttatttttcgttgtctttggtgggtgtatgaagaaatttgtctagtgcatgaaaaaaaatgcttatggatttctgttattggaggttcattttgagctatgactcttgcactttatttttattttgaatagaatatacaattaataatttctatatgttcaaagtaattggatccacatttagacaattatattttttttctctctatttggcgaaaatattgtgtaagtttataattaattagaatttaggttgaaactaattattttatttgatgtggttacttattattatatattttaatgatttcatcgtattattaattgcttgtgatacaaagttaattaatagttgtgatgtaaagttaattatatttttgcatgcaattaactatatctaatagtaaataatttttagtcacagtaaaatcaactatatttatacatacaatataatttctgcattctgttataattgtatttttaggttgttatatataaatagttgaaaaagaatgataattttatatcatcattaatttatttataaattttattgtctattattaatctcataagagatataaataaaaaaagataattaatattaccttaaaataataataaaataattattttgatatttttttcttgtgacaattataattagattaaggaaataatattttttttcaagtggtgatgaaatgcacaaatttgagtgggacaactataattttcgaatagaaaatggagaagaaaacaaggactccatccatgtattttatttccaggaagcagcaaggaaattaagcaaaagcgcgtaaatgatagtgtcagcacatcatataatatcttatgttatctgcttaatagtttcattgcgatggcggatgaagggggaattgcgaagtggcgctacgatgtatttctgtgttttagaggggaagacacgcgccacaccttcacaggtaatctctatgctgctttgcggaaggcgagattgaggacattcttcgatgttgggttgaagggtggtgaccaaatctttgaagctattgttcaagcattggaagcatccaggatttcaatcgttgttctctccaaaagcttcgcgtcttcctcgtggtgccttgaagaacttgtcaagatccttgagttaagggcaacaaagaagcaactagttattccaatcttttaccacgtggatccctcccatgtaaggaaacagactggtagtttcggaaagtacctgattagacatgaaagtcgcttgggaaaggactccgagaaaatacacaagtggaagtcagctttgtatgaagttgccaccttggccggatggtgtttcggagacggaagctgcaggtatggcgttttttcttcttcttaatttagctagtaccgcttcttaattttaaaaaaagaaaatgaaaataataattttttgtaggcattcaatactgccttacactttgagagaaaaaagaaacacagaacaacgtgacattaataagagagataatgaaaaataaaggtgtaaatatgtttttaatagtttagtgtttttttttttaatttttgtaatttttttatttttagtctttataaatatatatatatatatatatatatattttacttttagttttaaaattactttaaatagtactctagatagtaaaaaaaaaaagtcctataagaaccaaaataaaaataaacattgtttgtaaggattaaaacaaaaaataattttataaaaacaaaaaaataaatattaaattataagaattaaaaagatatttaagttaaaaataaaatgtttcgatccaatgaatttttagcctaggatggtgtttatgtatcattgttgaaattaaaatttcatatactaagttaagtaactcatgccgattattattgctgaagtcatgtaaacttgcattttaatcctcaaagaccaaaaccacttgtgatatttgcacgaagcttttttccttgatttataccttattgaatattctaacttctgagttgtcaaatgactcgttaacatgggcttgagccagtttatgtctagaattgcaaggctttggccaatattcttaaagtgacaatctaacgtaactagttaattctcctttcattcttaaaagaaaaacaaaatagaaaccaacaataattatactctttgataaggaatttgttttatgaattatcacactagaatttattattggtaagaaacaatctaagcttttagctaatttatcaagttaattttactttgttttgacttacgagttttaaggtttgaaatctttggggagattaattattcaaactcaattttattatattaaaaaaaattcttttaagcactctttattaaaattataaaatttatagatctcactttttacttaataattttcattcataatttttaattaattgtaagaaatgtgcaagtgtgtgagagagtttcttgcttgaacccgtcttaaagtaatcaataatagataaagaaaaacgtaaccagtgcatgaatgaattaaaaggtcatgtacttttttgtaggtaccaatatgaatatgaattcatcgaaaacattgtgcgagaagccatcgccattgtaccccgctatagcatttttctgagttttagtggaaacgatacccgctcctttacaggttttctgaacaatgcattgtgccggagtaggtaccaaaccttcatgaatgatggggaccaaatttcacaatctactaatggagttattgaagaatcaaggctttcgatcattgtattttctgaaaactatgcacgttcctcgtcctgtcttgatgtgcttttgaccatccttcagtgtatggagacgaaaaaccaactgatttgtcccatcttttacaaagtgttaccgtcggatttaaggcatcaaagaaatagctatggtgaagccatgactgagcatgaaaatatgttgggtaaggactctgagagggtgaagaaatggaggtcagctttgtttgatgtcgccaacttgaaaggattttacttgaaaaccgggtacaacacatattattcttttactttttgcttattttcatgattcatgtctattatactagtaatagttgatgataataatcacttaatatgtgcatcgttcttgaaattctatgaaccgtttaatttgaaatccgttcatttaaatttgactttgttaacaaggaataacgttgtgagagacattggggtacggagttaaggctttgtttagagtttgcaattctgtttttgttgttgtgtggtaattacttttgtgcggatttactttgataattttagaaagaaaatgaaaattgtgtatgaatgaactaaaaggccttgtatttttgtaggtacgaatatgaatttattgacaaaatcgtggaaatggccagtaaaatttaaaatggcttaaatcgatcaagccctcgctcaagtgtcaactagaaggcagaactgatcaattcaacagattacagatggttctatgagcagtcattagctcacaaattgatagtaatagtcgtaatgcttacaatcagcactgaggaattgatttggaagtctgaattttacttagaacattagcaatttctagaaaggtgaatatatatgtcctgagggccatggccagaggcctgtcatcttgaaattgtgacacacactctcgtttaagtcatatttactttgatttcccacatgtcatgcatatacaaataattgtatgagttagattaaagaagctttagcattaaacagattgaagacaattacccagttaagatgctgaatgatgtttttgttgagaatcaaccgacatagttattcgtgatgtatataatcgaatttcgtaagacacaccaaacatatccttgcatgataacttttgattttggggtgtatcccgccgggaagatattcaagattgtgcagtgtaacaaatacccttaaaaaatgattaacgcattatgattttagttagttaatagtaaaacgattgctgcaagtttaaaaagatttgaaatagtttatagtattttgaccgtgaaattttgtgcttgttttagtcgacacaatcccatagatatttgagaaaaaggataaacattttctctgaaagtcttgtatcttcctcaataggtactgtaccataggttaatgttaaatttttaacatgagaacaaactaaaagtatgtaataaagagtaaagtgcaaattgatcatagaagaactttaaaataaaagagtattgacgaaaataaagtgcgcaaaaaaaaagatacaaaaaattaaaggagtaaaaagtttggagaagaaattgagattgaaaaaagatgaagatttaaagggaagtataacaaatgtaaaagaaaacgataaaatgaataagataaagtgctgaaattaaaatgtttgagagtattgtaataattcattgatccacaagtgtcacgatgagacaagaggatatgtgagtgtttacaagtttcaactcttattacaaatttttaaatcttcctcatcgataactttaatattcaatgtcaatcattaatgtcctttgtctttggtattcgtttttaatatattcttcaagaggtatttgtagatttttgttcctctaatggttaaactcaaatgctttatgaaattattgcttaaaaacatgttattttcccgtgtcaggtgacctctaaaaaagatcaagctcaatactgggctgattcttcaaagccatataaatttatttcagtgccggagattgcataagcctttaaaaattccagatttggaaagtcggtagaatccatgtgtactgctccctttaataaattaaagagtcatccttcagctttgcccagaactagatttgttgtgccaaaatgggagctctttaaggcgtgtttctcgcgcgagagaccttgatcaacaggcataagtttctctatatttttaggacctgccaggtatgtatatatactcaagtaaataaggatgcacttgtttctatatatagttttcaattcttaagtttttttacaagtagaattcatgataagttagcctaatgtttgtgatttcttggtaccacttacagaatagttgtcagtaaaatttgttggaattgtcacatgcacaatgtttgtgcaaacaaaatttcatggtaaggatgaggaatatggcaatctctatcaatctgcactaattttcggactcatacacatgatgtttaatggtcattctgaattgtcactcatgatagcgtgtcttttacaaacagagaggcaatttattttatcctggacaggcatgctctttggccacttgtattcttggtgtaccttattcccttgttgaagctatagtatacaacacaagaccatataacagcttcaacaagggaataaggtacaccaagaatccaagtggccaaagaccatgcccgcccaggatcaaataaattacctttttgtttgtaaaagacatgctatcatgagtgacaattcaaaatggccattaaacatcatgtgtatgaatctgaaaaatagtgcagattgatagatattaccatattcctcatccttaccatgaaattttgtttgcacaaacattgtgcatgtgacaattccaacaaatattctgtaagtggtaccaagaaatcaccaacattaggctaacttatcatggcaaaaaaattaaaaaatagcagtttaaataaaaaattacaagaatacgacagtttcaaaagtattttgaaatctattgtagtcaatcacgtcctggctggacgtgttcaaacacgccccagccaggcgtgattcaggtccattcacgcccttcccagacgtgtttggtcacgtctccaccagttgggataggtgaggcagtcacgccccacccaagcgtgatcttgtgtcattcggcgagaaaatggtgttcttcttgggaaaacccggggtggcgctggaagacaagtttcttatggggaaagcttttcaaagtagaaagtgtcgagtaggacctcgacgatgatgctagcagcagcacacacgtgtgtgttaaggacggccagagatgccaccgtgctcgccacgaacggacctccaccgttgaacccactccaacccatccaaagcaggcctgcgcctgcaagcaccataatcatgttgtttgatggaaatatttctgtccttttcagatcgtggacccacctattcaaatcaaacaccatcacaatgcaaatgtcagcattttattataaagaaaattaacggcttcaaattattcacacaacaatgtttgtaatcctttctcttgaatattcattgtatatttgtacatataaataaaattaagagtgaaattaaattttatttcaaaagttgtttggtaatattacgtaccataatcattcattttttttttaaaaacaatatcacccacattatttatattttagttgaaacatgaaaaaatctttttttttcttctttatgcgatatgatgcgtggatatatttttacatatattttaattaggtgttgtatatgtataacccaaaataattattatatacctttcaattatgataattatagtgcatatagttaacaagatctgcattttcaaggccgtttgtttgagttttattttagtaataatttttaaaaaattttaaaaaattacaatattaatgagattctttaaattgtaatataagattcttttttaagttattgatacaatagaatatttattaactttatgaacgattaatctttgtaaaaaatttaaataattaacattagtcattaattggatacaattaactagacaaagaaccaattattgtagggtctttactcttaattcttttatacatcataatgaaattttacataaaaacattgagtctaattttatttagattaacatgttggtgtaagaatttaaaaaatatatcacaaaatttatttgttaacttaaacacaattatgaatttttatactaagagtttgcttttaaaaaacaatgatttaagtgtttattcataattttgattataaatgagtaactaagacatacgactagttatttaaatgaatttttgggtaaaagtgataagttagagaaaagtgaatgacccaataagctgcagtgaaaccagcaactccggaggagaggtgaataacatatccgccagagaaatcaataaccccaagctttgctaaccagccatcggggcaccaaatgctaaaggcagtgacggtgtacgaaaaagtaagccaaagcggcacaaacagcatccacccacgaaagttcatcctcccgagcaacgccccagctatcaagatcaaagtgatccccgcaaaaacgccctgaaaaaacaccatcgtagcagtgggaaagaatcccagaaaagcttttcccagaagaaacttgtcgtccagcgccaccccgggtttccccaagaagaacaccattttctcgccgaatgacatacggaatccccacgccatccagtgaagaatcacgcttagcaagatcacgcctgggtggggcgtgactgcctcacctatcccgcctggtggagacgtgaccaaacacgtctggggagggcgcgaatggacctgaatcacgcctggctggggcgtgtttgaacactgcaatagatttgaaaatacttttgaaactgtcatattcttgtaattttttttttaaactgctattttttaatttttttgtcaacttatcatgaattctacttgtaaaaaacttaagaattgaaaactatatatagaaacaagtgcatccttatttacttgagtatatatacatacctggcaggtcctaaaaatatagagaaacttatgcctgttgatcaaggtctctcgcgcgagaaacacgccttaaagagctcccattttggcacagcaaatctagttctgggcaaagctgaaggatgactctttaatttatcaaagggagcagtacacatggattctattgactttccaaatctggaatttttaaaggcttatgcaatctccggcactgaaataaatttatatggctttgaagaatcagcccagtattgagcttgatctttttgagaggttacctgacacgggaaaataacatgtttttaagcaataatttcatcaagcatttgagtttaaccattagaggagcaaaaatctacaaatacctcttgaagaaaatctgcaactcccttgcaggatggaagtttgaagccaaatgattcaaaaaactccagcacgtctcctatggggccttgatattcaacgtacccctctgacagaagcagaagatcatcaaagagctcaaatgtttatggtgcaggttgaagtagagccattagaacagtagcatccatttggtgaacaaaatttcctatgcattacactacttgggatgtggtagagctatcagaacagtagcatccataaatagagcttttcgtggtccaacaatcatttctcttggagaaaaaaatatgaaaggcaaaagtatgtcattgcttgctacaatttttaacttcaattagtgccttcataatgtcttaatcttctggtatagacacagtcaaaacaaatatggattgaattttgtatcatctataaattattgttcctagaacaaatatggattcaaatgtatggactgtgttagcttctctattattatatattaatttccaatcttaggagtcaaaaacaaaattctaaatgaaatctccttaaatcttatcaaagctatatttcacaaaacaagaaaaaaataagggactgaatttggaccctctttctttgtatgatacaagaggtaatccagttagattaacttaagcatatatcactacaagagccaaatttcaaagaaaattgtaacaaattcctagaaaggggagagagatcacctgttgtaactctcattttttgccaacagagaccccccttagcatatcattgcccacaaccgtatctgaacatacatcaagaccaaggcactttcaaaacataatctgtcttaacattgtggtttttgccaccaacaagtgttctgttgaggagtaaaatcagtttaaaaaaacacaaattagaggacttctcttaacttgcacatatgcatgatttttcagatattatttacaagatgaaacaaccttcatgaatgcatcaatttctggacttggcagtatgtttttctccttctccaagcgttcaagatttttcacaatttctgttcatgacattagaccaggaaattaagtaactgaattctgaaatggaaaataaaaataactaaaaatggcacataaggaaactaatatattatatacatatctatatcacttgaaccttggcatctgtttgcaaaatcaaaagtttgtctcactgtcagttctgatatgtgattatcagtttggctagtgtatgcaaaagccctttgaatacagaactcgttttgctcatggccattgtatgttatactaccacttttctgcacaggtatttaaggatcaaagttctaatgtaattctatgatgacaatggaattttgaagaatgctatggcgtatcaaaattcttggtatgctgacaattcagaaatggacttgttccagttagataaaggctataaaaatagaatcaatcttaattcctattggtataatgatttaaagcacattggtttcagtgtttcacttgttattgtgctataactggaatacactaacaagacgatcattcatgtaggcacaattttttactcaattcctattctataaaaataaaaaatgttgactaaataaggatgccctacgtaatagcttaatatttgtttcaaagaaccgaaaggtacctataatattagtaattacaaattgtaaagtaatacacgtatataacccacacggatgatggttatagagtttaatttccatgaactccaaaatttaaattgtcaatcaattatgaattataaagtagttatcgtaaatatcaactaacttactttatatgacagtttgtaacttaataacagtgtaaaaatcctgtacataataagtacatacaatatttattagtcataattaaattaatgttaattattagttctttaggaccgtagagaatgttaatcctgcatagaatttgtactaccttgaggttgctttcaagtttcctgcaagagccaaaagtaaggtagttttgcccgatcctggagttcctaacagcaacgtcatcctacacaacaacacataacgttaagcttgatattcattacgatataaacatatatgaaactctggaattttctccatagaaaaaattctattataaagtaattgagagagagaggaggtgggtaaagagggtggagcacggtctttataaaattagtagtagttgagagagagagggggtgggtaaagagggtggagcacggtctttataaaattaaaagtagttgagagagagggggtgggtaaagagggtggagcacggtctttagttgttttgactatactttgtattttatattctaaattttaattattaatgttatttttttataataagttttgttaataatgttaaataaaaattaaatgtatttaatattttattgtacaaaattaatattttaatttagtgattaaaagtattattaagaaagatgatgtaaaaagatttaaaactgttggatgcgtggaagatgggtgttgctgatcaagtgcagaattcaattcaccccgtgacccgtaacaaattaaagtaaattctgcagtttctataatggcacatgtactccacatgcattctcataaagcaattattgatatatcatttgaaaagactccacacgatttctaacagggtatcaaacgaagcttcattaatattcatagcttagcatgggttcagcctggaaggaagacaagcccaactttgacccacttggtattttaaaaaggatttgatgatgcctatggtatgagtagtgtagcgggaacaatacaaatattaatctaatatataatcagcaagtagattcttatagtcagtatgatagctaatttattataaataaataaaatgatggttgcagaatcttcatcttaaaaaatattaatgtttactttcaattatgaccatagatatatttatatttttttttaaactaatattttttttgaaattttattgaggatgaaataatcacatatataatataaatgttatatacaattagtttttgaaaatcacatttaaaacaaacaaaattcatatataatgtagaaaataaacttaataaataattttatagcattttcatcatattattgtttgataagtcacctaatgtagcgtgcacttagtgtaacatgaaagtgcactgccattatttgattctccatccataaactccgctgtcaaacgtaatgagtaagtctgtgctatgtttgacattaagcaaaatgttacaaaattaaataagctattatgtcatactaaaaggtaactaaatttcagagttacttaacaaattatataattgtccaactttaatttgattaaaaaaaaattgaaacaactaactaatcaatatgttatgttggccttagtttggcacaccttgtgttgttactaagtgttctaataatgtataaattgcctttaaaaaaacaaaaaatacgtcatgtaattataatttaataattagttcgataaattacattttatataaaattataaataatataacctgaatcttgttccttggaagttttccactaaatggaacaattgtgtttatagatccagtcatattagttttaaagctacacgtgtctatagataaggagactactctgcagatcagttggctaattttgcagttctcagtcgtaattatttttgctgggtttcagttccccctttttgctctcaccgttatgcccgtaattttaatgagctgctatgagttttgttgatttggctatggaccttggtctaatcctcccatattttgttttctttcttcctttgtatataaatttccgttgggtattggtataaaatcttagaaaataaggatgtcaatatagttgtgatattttttatatttttatgtcttatccgtcctttttaagaattatatataacttataatagtgtatgttttgatttcataaacattttttatagtctgaaaatcaaaagttaaaacgtgaataattttttaaacttttacctggccactttctacgtaatatatttcccacaattcctttcattgatcatacacgaaccatttttcaagactactgaaaaccttcatccttaaaatacttgattttatgatagaattaaaaattattataaaaaaactgatgtgacagttgcctccatcaatttatcagtttcagattctttttgtaaaagaacaattaaagttctctaaaaaaataattaatgtaacaacacgtacctaatttttaaaccagtcatcaatgccacaagcaagcaggtacattgcttatccattgtcttacttcctaattccactattcttaatacggccctaataaagctaccaaaattatcaaccattattttataaatgaaagagatacaaaaaaaaaaaatagaatacttttcaaaatataagagactgcaagagtcttggattaaatttctctgggaatgtagtatgatattaaaaaaaatatcaaatttcaaaataaatcaatttaatcctatttttatactttttcttctctctttattattacaaatattcctcttaaaagcattatgctataaatgattgagtgttataaaagttgaaccagaaaaattgaactttaacctttatcggtatatataaatactaattttccttaattaaccacaatttacactggcctatcgattatatttcttgtttgattacatatctctagctctttgctcatgtcacaaccataaatactgccctcctaatcttacatcataggtattgccgaaggctttccccactcagagactccatttcctgcagaatttcctgagcaagagatttaactgaaagctccacatcctcaagcagttcgccaaggaaggggattgtttcagctatgaacactagatattcttctttcaagttctccacaaaatatttaacaattctgaggcccaatattttagctcgcaatttttcactccgtgtctgcatcaaaacctgcaaaaaacgggataaagaaggcagaaagatattcagttgctaaggaatactagtatttgcggggaacaaacatatagcattcaagagcaacacatattactgaatacccaaaactattaacaacaaactaatggactaaacttcaacacataaataaggcattgatgactacaaaggaccaaagctaacgtactatgaaatgggatgcaagagtacaggagcaagttcagatctttaaagatcattggccggtagggtaggtcaaaaccgcaggcgtcaattgacattattactaaagtttgatcaaaatgacataaaagctacagtctatttacaattaaaccttataaagcccgataaacatagcagaaaaggtcaactctaacatgactgaaaccctgttcagataaactattcaataagcacttacagaataaggaaaaaaagagcgtaaaatgaattaagcttctctcataagttaaaataaacttttatagaagttctgatttagcttctcaaaaaacttgttttaattcacgttaatttcaacttaagaaactcaatccattttacctacttattttattctcttagaagttcttgttgagagttttcccaaatagtacatgattttactatgcttaggtgatgttgataggtagttgttagcaaggccacaaatggaggtctagcaaaggaagttttggtaaggatttgctcgtttttctagtttgaatgactaatgttagaaactccacgtttgaacctgctggcatttctaggagcccatttgccccgtccagcttgttggcttgctgctgcaccacagctactgactgaatgtttacatgtaagaggagtggattcgttaaattaaaagttttggggggccatatctgtatttacacttttattatggcctttagagagttaattacttctactgttagacatattcttaatctattgttaaaatgtcttggggcatccatgcacccaaactaatagggagaatagtagaaccagtcatattcataacagtgtttcccgaggacaatgatcatatgcattttccctcaatgaaaaacaagatagtgaagccagtaagttaccagtatgtcagtatcaaattacttgcccaatcattaacgagtagtaaaaatgaaaagaaatcataaagttcacctcatgattcaaaggtttccacaaaaggtcagatctagcagtcactgccatttgaccgatgcacacaaccagtaggtcatcaacttccttcacacttagtatatttatgctgtcatccaacagagctggtggatctacaacaagttgtgaaacaatgggtctcaacaacatctgcagcaagcatgacataacagtcagtgagagaatatagcaagcaactatattactgaaggaagctgaaagacttaggaatattttattcctcaatggaatgagaaaacatgcaaagtatttttaaatggaaaggaaaaattcccaattaatgcataacctttaaaaaattccactctaggtggaaaaaaagtcttctaaagaattttttcataaccatttcaaatggtaaaaatagatattgatgcccatgcgatacatatatcagatatgaaaagtatctgacatgactgcaattattctaaaaatgtataggataggataggtataagatataaatctagacatgtaaaaaaaattctgcaaattcaaattaaaagcatacttcctgcacattatttaaaaagtataaatcatcgtaaatcaagtcctattaatctaccaacaaaatagtatcaatctcattacttttttgagatcatccataaagaggatagtttccattttggtgcatcaatggacaatgcttcaatttttatacatgcttctatgtctcaatatgtaaactatattagattttcatatctttaaaaaggcttgatgcttcacagacgcgtatcagtgaagtattcaaaagttatggtatcggatacgaatagatgaaaaaatgagttcttagtatgtaaacaattcacttgcctggaaatttgaggagtcaagaaacttcaaggtcccagtgtcgtacaagaaacacttatgtaaggatgacaagactagagccctgagatgccagcccttgatagacacactgcctatttcttttatattgccatcatctagaatcctggcctttttcttccgattcactctagacacttccacatctacaccatcgctaagatgatgaacacaactaccaagcaagtgtttgaagtagggaacaaacaatgacctacaaataaggatatagaccatcttaaactgctgtgatttgatcattattttgggtaaacaaggtaacatcataacaagtgattatattcttatgtttattggcataaacataaaaaataattaaggaaatcaaattgaaaactaactactgatttaaatactgcgaccaaattgtacaagtctcaactgtcacaagtggttgacatatttacagtggttcaaaacccaattttcgtatctacatcacatgtacataatttaatacaaacaaaaagctaaactcttcttctgagaatacaaaatatacccaaaatatttagaaacccaaataaagtgttgtttgactaaattcaaagcatgcttatttcaaagaacattttctaaagcgaacaataactagctaactaaatactgacttaccgatggctctcagtaagcttatttaccatgccatagaatgatatggccctatcaatgcttccgctggatgcagtttcatccacttcagattctgcccactcaatactctttatcagaagaggcttgaacatgctctcagtaagttttaaggttagaacagtcattgtgttaagcacacctttttccactacatcaatgttttgaactgaaggaggactttgacggcgcagatcaagagcaaccaaacaatggtcaaatatctttccatggaatgccacaatagatgatctgtccattgtaccaattatggttcccaacatatcaaatacaattgttaagcttttatccccagcctcaatggcagctgggtataattttaacaaaggtggcagggcaagtcgaacctgtaaaaaaatagtgattggtaaagaaaaaaatgggtatttcatttcataccacaattacacaatgctacattataacaagtcttacaggaattttttcagcaagaagctttcgtactccatgagctctagactccacctttacatccattcctgaaacacattcaggataaagcaccagaagctccattatatttgtaagatacggatttaaaaatccaccaagcttgtccacaactgcctccaaagtgatgagaacataaaaatgggattcatttaaggctgataaaacatcggtggtttcgggtttcatatccaaactagccaatacttgacgagatgacttcatcacattgtccataatcttgggaagttctgccagtgattttggacctagaacattgatcagggcagcagttgttctgaggcagctagaagtcacagccaagttatgagatgcaatatgtcttgtaacagatccaaggcacagactaaagatggaattattcgaaggaaatctttcagctagaacttctaatgctgaaactgctgccactttcaaggaggtatttgatgaatcatcaagtactcgaataatttctaaacacaatttattaagtgattcttgagaagtttcactcatatgaagcaaaagaaaacttggagttgaccttgaacctttattgtctttaagctttaaactgacatttttatgatttcttgcagcctcacgtaacagcccaagagcctgcagcacaagaaatacaaatatcaaatcacagttctcactgtcttgctttcacaccacaaaaaagatgtggatttctataccgtgctcatggtgtgcaaacattggaagactcttatgtttttcgatatatcaatactttcttttctattaaaaacttggggcgtttacttgcacttctattgtctgttttctttagtcacaaaaatgtcaccttgttttcaatttgtttccgattgtcaaatcaggaaatggagggggaaaaaagtttttagcgcttcctatacaaataaatgaaaacaggaaacagattgaaaacaaggtggtatttttgtaattaaaaagtgaaaacagaaaatgaaaacaggaaacaaaagtgcaagtaatcacccccttagtatttttggcttcttattgtgcgctcatgctcacatattaaaaggcaaataaataatttaccaagatgtgtggtcaataccaactaaacaatttacagtgtatatagaaccaactgtattcataacatgtgaataaaacccaatcatcatatgaaaaaagaataaatgaccactgtgtatacagtatacccaccaaattaagtacacatcttgaaaatcaggatgtttaatagaatactatgaagcagataaatacaccaccaaattgtagtttaccactttacccttgtatcaaaataatacaagatcctaataaaatctcatattttgtaacttcattaaaaaccataccttttttccaacattcttgtctgcatggcgaagcaatttaattatgctctcaaagtatatgacaggtatcataactgttgttagattccttgcaagtgcatgcatagtttctttcaactctgtcctcagaattacagggaaattcagttgctttttccttgcatctacaagttgcatgagtaaaacaacatgctccataagcgcacccaatgccctctgaaatattcaagaagcgatcacatttatttttattatgaatatgttcatctaaataaacaagagaatataggcttattcaaagattagaacatttgcaaaacaaaaaaaaaatataagcatgcaacacttatgccattgctatcacaataagaaaccaaaaacagcatctcaacattaaacctacaaagaaaaaacaaaatatgacatattctacaaagaatatttcagttcaggttttgataatgaatattgttggatagttgtctaaattccagtcacacctagccttagttgtggcctctttgggggttgccttaattgcaacctcaagggtggtaatttagtcccacatcaactagacatgtggttaaatagaacttatcaagcttgggcagtcctcaccttgcaagccagtttggtcgggttgaattagggccctaagtccaatttctgataaatatgttcatctaaaaaaaaacaagtgtttataggcttattcaaagatcacaacattaacacaaatataagaagcatgcaacatcaatgccattgcactcacactaaaaccaaagacagcatctcagcatgaaacctacaaagaaaaggaaaacaaatatgatataaattcttctacaaagaatgaatatttcagttcataatatgaaatctgcttctgcttcgatatcttcgtaagatctgtccctcaccttaaaatcacaatttctgattgatagaaatttaacttcatcatgtgtatcatactattttgtcaggcaaattacattgacaccccttaaacttacattcaatattttttttttaccccacacatacctccttcaattaataaatcagggaagatatatgttaatgataggatccaattgcaggctatgggaatcaagttgtacattagaagtatgcaattctagcgaggtttataaggcctcgggctctctaactaagtacaacggctagcttttgtggtgttgctctcccaaagttcttatcaattggtatcaaagctttccaccatgtcccttagcctgcacacaagcagcaagggtggtgacgccacattgcagccagtgggtgtcaacatagtatccccaaatttatgagttaagagatatcaacatctcaaaaacatactgtatgtatctgctagtcattattgggcatgggtcaggcaaaaatagaagctattcataaaaatcataatataagttacatctagactttgccttatagaactgaataaagacattaaaaagcatacaagtatctagcatgcatctgatatggatttatacctgaatgactgaggtatcttcacctgatttcaacttaaacacaaattctggatcttgcaacttttgcaaagaaaattgcattacaataaacaattccagaaacattgcctggtcaacatcactatttcccctctgttcaagcagtatgactaaagaaggaagccaaatcgtacttgtatattgttcacaaatttgcactgcaaatttatattcccactcctcattataaaatgttaaaacatcttgcatctcaacattaaggaaacaggcagctttccttgaaattaatgaacggaaaagtaggataagcaatgaggctaagcttttaccctcacccaaagttctgcaaaacagccatcattataagacacaggcaaaaaaccgatggctgaagtatcaatagcaggatcatgatgtagaagtagaacaagaataccttaatagatataacacaaatgacagccttctgtgctcaacaatttcaggcaatatattcatgaaaatctggaggaaaaaaaaacatattagtaggttgaactgctaagagattcttttgtatcaagcagcagaagatcatttatgtgaaaaacaaaccttcagtaatttctccacatcatctgtcttagccagccaacacggaacaattgcagatataagatcctcaaaaacatgcttcgaatgactgtcaatctacaggcacacaaaaaagagaaatgatgacaccacagttcctacactggattattagtccctaataaattgaattgtgaagaatttctattaaatactgcaactaaaagttaagttgcaacagttaataagtaaggtcatccaacaattgaggtaggtgatgtaggattttccagtttccacaccccctccccttccacagatgcctgctgaccaagtgatgcacaaaggaaactcggaaatgacagaaatggctggaggctttgataccatgttagatttcatcttaaaactaattggcattaagtgaggttgtccgacaagtataaaaaccacgccctagtaatcgaggtaggagttgtggaactttccaacaagcatggaaacataagaaaaggatgtaataagctattctacacaaataacattgttccccagggaagaaaaggatctaataagctactctaccaaaagaatgccctaagttcagtacagggaaaccctgtattaacaaacctgtgtgacagctgcttgtccaataacttctagaatatcaagcatatgctccaaaacttctcctggaaagactctggtaacagcagagagaacagaaaatacatggttgcgggtgactgcaactgtggaattccgggcgcactctatcaatagcttaatgttaatttcatttgtcattttttcctgtcaacaatggcaaaacttaataatataaggaaatagctaaaatagtgaaaaggtagtcaaaataatatttctaacaacataataaattttccagcttcacaaggcatacatttaacggatccatgcttttaagagaaataattatatcctccaggattatcaacagagtctgttgaatatgatatattgtgtaattgttggcttccgaaggacttgaaggttggcttaactttatcttcggggaaaaggcaccattcacccattcttctgaaaataccttgctaagaagcttaaataagggccctaaaagtaaatgcctgcaacaatcaaactgagaatttagcacagttaaatgttttaactactcatctcagcagtacccataatgtaatgttcagattcagaagtaaccaagtcacctgtttgttatgtccttcttcagtagcaaaacatcaagaagggaactaaggatgtagactgcattaactcttctgaatatgtcattaggaggatatcctgcttcttgatgtcctatgaatttttgtttcttcaccatcttttcttctgctgaactacttatacaactcttctgtgcaagtataagatcaagcatgtggccaacagttgagaaactaatctgcaattccaatatatccaccaattattcttaatttcatttcttttttttccttccgtggaataaaaagttggaaaaaacctcccatacaatgaaaagaaacaacaacaaattcttaccccacaaggtgagattggacattgaagagcatagtgcaaaacaaacaacaaataacattgatagtgcaaaacaaccagttgatccaaaaaggcttcggtcagataacaatggaatttacattgttaaaatttatcctcaggtcactaccatattaactgtttaaggatttttaaaagaaaacatttatcttatcatttaaaaaaatctacaatcaattgatgaataatgacatatcatccattttgtcaattgatgaatttgaagctaaacacccagcagataatgatgaaacacctgtttcacagtgaaatctgctatcaaataaaaagcaaggaacagaacagaacagtgacacagataacggaggatagaacacaaggctgccaagttcaacagccagaaaccatcacggtctgattgggaatagatggaaatactgccatagaaagagagaggccatgatttgtccagaatcagagagcacaaagctaaaactacggagctcattaaccacagtaaaggggaaaaggatccaagatccacaaccccaccccccggaaaaagaaataaaataaaataaacacccttcttaaagggatgaaaaccccaaaggtccagattgaaaaccaaaagattaagttctttgcaagtaaccactaaagaaatcgcacacagaacacatgatatttgatcaagagcaaggaactcacatctatgcacattaatgcctctttagttgcacgttgtacatcaccattatcattatgccacaaaatcacgagctcacaaaatagatgctcctgacaggcataagaaaaaactattagtttaggtcacagtaaaagctacattggtgataattattttatttacacaatgaaacagattatcataaactcattaactagatcattagctatactcatcaattatcatgaatgacaacaacaaactctgaaaataaatagatatactgccaataagaccttcacttcattcttcaacttcatatagaattgattgttaagtttgttcaagacagtgatacaaggctttacacaggcagggtcatctgatgtcatgccgcccaactgaaagatcccaagaatgaagtcagtaaattcaaaataacaagacatgacataagtaaaacacacatcttaatatcttacccgcaaagctttcagtaaaagatgttgaagatcatttccaccagagggagatgacataacacagctctacgcatgaagaagaacaagttcacatcaaacctcataataaagatcccataagctaaaactaaaatatacaatacacatacctccagcaaaaggcacattatctgagtttcagtgtttgacaactttggacaagacttattgagctcattatagtactgctccagaaaagaagacaacaacggcccaacttctggaacgtgcataagggcattcccaattcctttgaataaggataaaatcattagctgcatccaacatcaacaaataagttacttccttaaagtctcggcatagcacaaaaaaccctcacttaacactgttaatctggaactgaacatatgaaaccttgatctgtatctctatctccacaactaaaaatataatagaaacatagaagagcgttaagacatcaaaccttcccatagttagagaatttaagagtggaacccaaaatgaagccaagaatttttatttttgtaggctggtcaaacctgaaaagatatgtttgggaacaaagtggaataaagaatcttagaaattagtacaaatgaacatttttaatgaatgaagataaggaacattcttgaaaaaaataaaaacagaaactaacaagcaaaatgaaaaggtaaaagtaagatggggaaagttacaagataagactcacagatatatgcatcaaacaatgagcgtaagtatcagaaccaataacaacagaatattctaaacctattctatcccaacaatcaatctcaataacacaaaacagcagcttaaagtccactaaaaaggtaagccgcacaacacgtaacattaaacaaacaaaaacactaaagcttatatgtaaagaaaataaaacaatgttaaagtctatatgtgactgtacatgatgtgtcaaattttatattgccaccaaatcctacctttcattatcctttaatgctttcatggtgacccaaaaggatcgcttcgggacgcttatgagattctagtttataatgtcatattttcatttaattaatggtcgctggcttctttgattgtagagagtctctactagagacttgtctttatgtatggtacataaagcaactttgcctgcttgaactttcttaggaagagagtatatttacaattagtatttttgcaatgactccattcatggctatatcttcatagcccaaaaggaaacactagccaagaactcttatcacaatctcgtcagcactcagcaaggaaaaaagaatcaaaagcaataaaaatacaaaggccgggcccatgtagcaggaagagaaaacagttaatcaagtgattggttcagtgaatcaatcctggccttttttagattaaaggagaaggaaggaatagggtttgatgttatataaaatttgacacttaatgtcaattggtcatataatagagacacatacacatgcacactaaagcctaaggatgcaatttaataaaatactccaaactagtgtcatattgcttagtttggaatttatcataatttcttgtttcaagtttatcgaagaattcatctagaggaaataaataaggacaagaagaagataagcaatcattctagaacaaccataataaagaagtagaacaacacaatagataaaaacagctctcaagtgaaaacccataattacaaaatttataagcaatataattgattagcatttgtactaagttaggattttgaataaacaggttttgaataaaaataggatcattcaactgtcaagttaaggttccatcctacagtttatgcattggttcagtaccattttaattctcagctgtttataatatatatgtatatatatatatatatatagtcacatttaacattgaatgaacctcctagagaaccctctatgccatctacctaaatttccatttctttctcctcccacccttaaatttactttccccttccctgtatgactttatttgtgtcatgcatccctccaatccttatgaactttgagttgttacaatggggacaatgaacagcaacagaaccatcatttcccgtgacaaagggaaatttactgtcagttgtcaaacattatatcatttagattttaaaaagaaaaggggaatgctgctctccacatttaagaagatctagctaattccaacaacagaacaagagagcatggtcatatttgatgagcagcagctaaggcaatgaatataacaaatagttctaaggtaataatattggtgacaatgaaatgataattgtcatagtaacatcataaataccttttttctatattttgaggtaccaagatatttcgaggctccaagatgtttggacaggatgagctcatagcagacgcaaacaatgagggaagaaatttcttgtcagacaatatgaatgttttttgctgatccatcaacgccaaaacatcacccacaaaatggatccacattgcattgttacctgttcatatcaatttagaaacttataaagttccaaggtaaaattaattaggcattgagggctacatcaaattattctgacaatggagtaccatttttctttccagaacgctcaacatgacaccacaatgtacgcaatgaatcgatacagttcaaggcagcaacccttatagtctggaagaaaattcaaaacgatgcaaagaaatcatttgagcacattttctcagaaagaaaaaagccaaaaaagtaacagaggataaccatttgtcaacaattataaattggcagtttgcagaaaatgagaaaaaatacacacaaggtcagagagtaacgctaacaaagaatcatacctgattatcactcgccaatggaacaagaacagaaggaaattcagctaaaagttcaatttgccatttatcttgtgacaggctacaaagaaatgcatagcattgaagactttcaacctggactgcagcaggaacacctgcagaatgaaagattcaaccaaaaaatatcaaatatgccaattgaattttatctgacttctgattcataaaatgttaaaaatatcaattcaaacaaccatgatttcaatcaactccctccccctcccccccccccccccaaaaaaaaaaaaactataacttaattgcatttgcatagatggacgaaacaaactggagttgggcttatatgtagtaatgcaaaaaatattattgctttagactggagtcagacatacatagatatacacaagctcttttgacgtgagataaacctcactgactcgaccgatatcttgatctgctttggagagaaaatgtgatggaataagttcttctcatccaagtgaacagaaatcatgtccaagaaagtatcaaaggagcagatgcaaggatcaaaggagtttttggtggaggtgctttcagatttaggataatatcttagcttttaaatgaatttgaaggggaaaccattgatgaacaccaaaatacagcgtttgataccaagttagattttaagaaccaaagagaaagttggcaagagagatttgagagaaaaagattgttctagatctgaaatcaaaacatattcaaaagtgtatcacctctgaatctgttacaatagagtgaacccataactgtctctaactaaaaactggcagcttacttctgactgaatacaagtcaaacaagtaggatacagaaagcctaacacaaaacagccactttaacacctaaacatggattggtcaggatgaaaatgcccctaacgggggatggaaggatttatcagggatatacaaaataattgaaaatggagtaaaaagaataggaaaaggagaaagaatggaaatagaaagagaataactacaaatataaattttgtaccttctaaacagcaaatatgtgtgtctgcgtgtattcattattatgcatgagagatcatgataattacagaaaaaatagttctattctctccctttgaaatacgaacattttaggagaatagagctcctttaatgattatttttccaagtatcctagatacttggtatagtcaggatcaatgcatcttaggaagtagtggcatctaaattgttctcttgttaaattgtttcggcattgattatctttgcaatattgttgaatataaacagttcactctactgggtagaaaatacaatcaagtacattcagaaaattttctttctcattttctacaccataacacaggcagtaatttcacagtagaaggaacacaacattggccaagtaaaatatgggaaaaatcaaacaaaaggaataagtgtatagcaccttcttctgtgaaaaacttagataagaggcggggaggtgatattctgcactgcgctgctaagtaatggaggtgttcatggaatgcatgcttcaatttagatgaagcaaaaaatacaaacagatcccttatcttgctgacccacttatcatcgtcatgctgcattttgaaaaaggttaatatccaaccaatgttgacggtgagagtctaacaacaacaaattccaagaaggaaagcaagttcataagacaatagataacaggattacaaatagtaaaggaattacttacaagcagaatgtcagaagttagtactgatattagttgtgctagcctccaaaatatgcaaatcataagcttcacattaagatggctcagcttgacatacaaaagatcattaaagaatgcactgcaatcccagtctaacacttcagacttgaactgcaaaacaacccgaattcccaacaatcaaaacagaagtaaaacattagcttctcattacaaaaaaagtaaacaaataatgaaataaaagcacaaatatgctagtaaatcctttgtacctcatccaatgagacatcaccagctgtcactgacgtttcccactcagcctttagaataggaaatacacattcaaatagtgcacaaatgtcttcatctttgatcaaaaggaaaaagtcaatatttatcattccttagtcccctcttgaaattttttggctaagaaatctaatagagaagacaaaagtacaactatgggatgtataagatatgcttcaaacatttatttctagcttatttgttcaaacattacttgtttttagtcattatacgatataagattattaactatttctgaaaaatattaaaatggaattcaaaaagagaaggggaaaacaaaccttttggttttatcaaaagagactgcaaaagaacaaaaaagaagagtgtctttgacaactccaaatcactgcagctttcaacaaaccaagctatatgctctttgggatggaccatgaaattcttagccatgttatcaatagtcttcaagttaattgaagataaacttccaggtatcaatgtctgcgattttacttcaagagtcactaaagtaaaagatgattgacaatttcatctgacataaacatattcatgaattgttgtgattactgattaacaacttagaaatatgatgaaaccaaaaatatctttttagaaaacccacactacaagtactactagtaagtagtaacatatcatgttcatgtactagactattcatggtgcaattgggttattccctacataatatctgtaaaaaatgtgcatttcaaatttcaaagttttggttttccaaaggagacaggacctaatgcttgattcatatcttcagttcaccttggaaaattctttataggatcttcagtttgacaaatttgccttgttgagcaacagaattaaatttcttcatattgtaagtgtacgttaaatttatagcaaactaattccaaagtagatatttaccccttctccaaaagaagatacaacaatattctgataaagtggccagtttattttgttgacaagtcccaaagcctttaaattcaagctctgtgtctgcgcatggcaaaataagttattatttgataattacccagagacgggaaaatctaaaagctattaaataagtacaagatcaaaatatattaattttctatccgaaaaacaaatattaaatatgatgttaaccactacctgtggtagaacaaggagtaatggaaaaatcatagcagcaacattcttcaagtaatcagcatgatcactgaagtaggagatggcattctttagacaagtgacagcaacttcaacatttagactatagttatcagctgaacctacaagaagagaatgggtgcataatacatgcagtgaattaagagcataatttttttttattcagttatgtaatcctcccacccaatcttgggatagatgcatcatcgttgaatgaatcattagtaaggaaccaagcaaagaccatttgtttaaagaatatctaaatacaaacatctctgggaagccaaattcatccttatccatggttacaacagaactgaaataagtttacttgtcaaagacaggaaacaactagccataacttaatgaggacaaatatactccagtaacagaagcacaactggaataagtgtatgaaatgaaggttatatgcttatatgtatctagtcaacataaagtaaaagcatattttgataaaataaacataaaaatggacaaccagacacccttcaaaaagaaaagggaaataatataagttcaatagagtaaatcaatcccaaaatacacagaagaataagcataagcatattttgaaccattggaaacacattaaggaagcttagacatttatgagaccacatctgtattctgcacgtaaccccaccatcccctaacagtcatcaatcatcatccatcaagaatgcattcaaagaacaaattccttttcccagtttatggataaatcgatgcatggtatgtattgcttcaatacaacatgcagaaacaataaagatgatatctatctaattatttttaatataccacaaattacctgacagcagtttgccagtgcatctttttagcacattctgtagtgcatcaagaagcttagaagaatctattacatttcgcaagccatcaacacgtaaagctgcttgaacaactgttagatctttatcatcaagctgtcttaagatgtcctcttggatgcttacaagattctgataaaaaagatgacttttggggttagctaaaggttgaagactttgaatatggaaaaacagtattaacacatcctagcaagaactttgaccatattataaagatttccctaagtcaacatgaaatcaacccataatttcacataaaaacagcataacccacgtgataatcaattaatttatggcttataaatataattaattatagcataccaagtactaaataatggtaccattggtactgagtacttcttactagcaattggtgtttgtgtttgacaatgaagcatgatgcaataaatttttatagcattttccaccaccacactttcttttggacagatttgtgcccttgagttcatcgtggttcaaggctcagtttacagaggggtttcacttttgcattttgacagtgttgtaaagatatcaggtttaatattgagttctgtggtcttcactttttgctaagcctttattacctggctcggttcaaatgaagttgaggtggcttttgagggatatatactcctccctccttgtacacctactctttcaaatgaagttttctaacaaaaatcaattataccctccctcaccaacaatgtgtaaaatcagtggccttgacaaattagatcacaaatgcatctcagttcaaatcattcaaaatggaacttaaatgtatcaaaaaatatttccaaataaaactagtttgacagcaaaattttgtaatgcaaccatttcctaaaaataaaaataaaaaatcaaagagaagtaatatgccaccaccatcagaaattacacacacttaaagaggaattaatttacaccgttgtaaatcacacttactcttacatcattatgaaatgtaatttttgccaactattgaattataattatatattaccaaaattatctatgtcaaatcttctaaaatatgaacaacaataagaagaaaatcgaatgggtttgattttatatgtcagaagtatatataacattaattttgaagaactgaatgatgtataaaaaaaattgaattaatctaaaattctgtagatatgataggaacttttaatccaacaatgggtaacgagataaatttatccaataaaaagttactgaatgatgtaagtgttggtaccaagcaatcacacaacaatcgagagagcggaaagagaagaaaaggaagaagaaaataacacgtagtgtttacgctggttcacccaatgtgggctacgtccaactattctctatattttcctcacacactcgttacaatgtactcagattacaaggaaatatataggtttagggtccctaagcatagtagctattcatgggtccaagcccaaactacaaataataaaactcaaggtcaacatcagaaaacaatccctcattgtgtgtgtgtgcaaaacagaaaacacatcaagcaaaattttaatagttctgccacccaaaaagagaaacatcaaggctgttcttcaaccagtgtcataaatgaaaaatacaaatttcaaacatgcagttttgggaggacagatatataaaggaaataaaccacatcaagcaagaagtttcaacttttttccaaccaaaaggagcacatcaaagatgttcttcaaacattgtcataaacaaaaaatacaaattaatggaaacatgaggttttgggaggacgagaagattaacagagcatatatacctctgaaccaactgccttggttttcaggataacggaattatttaaatcaagcagcgtagcacgtcgaacatcagcctagaccaccatatcaaatataaatcatgaagctcttacaattataaaaaaattatcattgttgaacaggagaatacatacttttatatttacatacacctaataatcaagaataggtcaacgattgatacctttggatgatacaggcccaaccaaatatttgagtctgaaataccaagtgacgaatccatactcccatccaacatcttacataaaaccttatacaatgaatcatctttcttagaatgcctttattatcctgttgaacatgttcaaagttcaagccattatatactatctgacaatgcatgacaacaacaaaaaagcagacaactcatcagcatacctgaaggaaatgatgagcagcacctcgtaattcagaagggtattttgtattgacaacaaacagaatcttttttgcccacccaactaatcaacatttggcaaaccaacattatgagaataataagctaggcaacaaatgataactgactagttgtagatttctagtaaaaaagataaaggtaaaccatatggagctaaatgattaaaaaaaaaaaaacaccataagaaaagaaaacaaaattattcaggagcaaaacctgacaataataatttacacagaaatcaacgaaacttcttcaaaagaaatttgaatttccaagctgaagcaagtaaaacaaagtacactgactaatgaagacataacatgcatgcatgatacacatagacaaatcataagccatatagtgagatacacaatttgaagatatctagttcattagagggtttgtttacaacacaccaaatttgttttaaatcacttattcaactgctttaaagcagtttcacactcaaacttggccaaaacagagttggtatcaacaaggattgttagcagcattaatgtataggacagtagtatgtgcaatttcctgtcttcataagtatctttcatggtctctgggtttctttataaatctatttatttacagttgaaaaaaaagagtatgtagtttcttaacaaataaaacttcccttcctgaaggcacacattagacttcaacatcaaattccaattttcttttatcagtttcaacacagggttaaactgttaaagaatggagtaagattctttgaaaacaaggcattgtaaccagcgtaatccaagagtttggctcttaattgagaaatgcttttcatactgtagaaatggagagtgatgacagcatttggtataatgcaatgcttttgttctggtgtttcaaacaccagttcttactatttatacagtctggacaaacattttattacttacataatattgatatagaaaacaaattaactgctaagtaaaccacttttaatatcatgtatctattgcatgtttgaaaagttctgtgtcggggggaataatttccagataagctgccaaaaaaatttcttcgcctccaaaataagcttatacaaacacaaagtaagatcttcatggtgaaagaaatttccaagtaacttaaaatgcatccatggtcattgctttcagaattcagaagaacattttcacacaggtattcaaacaatttttttacagaagtttagatgagatttctcaatcaccaaatgagattttcattaaatattattttcttcagaaatttattgattcactcttggtatgaattattagatcaaccttatgaagcacaccaggatatataatttggggtacaggatagtgatcagcattctaaaattcaaaatcagaatacacacctgacatggaagaagttgagtcgctaactttttgtgataatttcacacaatttgaaaggatcttggtgaccacatgataaacaagaccatgtacggggactttttctattaaggatagcaaagtccgctgacagtattcatctgaagaactgcaaatgtgttattgttataatcagcataaaacacaagcttctataagatatgacttaaagcatatatctcctgaaagacaatcataggaaacacacctgcagtcaatcagggagtccaaaagcacgaggagaaacttttcgatattgaactccttagataattctaataaaacccctgccaggtccctatatgaaaagggatttaataaatcataaatataaataaagaaaaggcaacagtcaaagcacagtgattatgcatatgatgagaagttcgaggaagactaccttatttcctttaatatctccaaggccttcaatgggagtatttcaacattttgagactaagaaaattccaacagaacaaattaaaataaaaatatagccattcagaaatagatattgcacaatgaaaggaaattggatgaaataccaattacaccaccccccccccaacaaaaaaaaggattaatgcctccgtttaaaccatacacaagcacacaggattacactagtacctgaacaagactaattaaggtaataagggacaaccgaaaccaatggagatctgtcaactctgtagcctcctgacgagcaacctcggcaaccaaacgtatcaaactattcaaaagtttaggagctaatgcagttttgtttccaagcaaaccaatgatcataagagaaccagcctgcaaatagaaaaccaaaaaagaaagcacaagaaagtgagcttccagctgctaattgtaaataaggacaatttgacaacaaaaaaaatgcaggagagggagccaagaaacatagctcaaatacacaagtatacatatattgttggaatatgtgaaaatattttatcatatgttagagtatcttagattatgttttaggattagtcttcctatacttccattatctctcaggattgctctatgattaacataaataagagttagtacttcggatttcatgaatataccatccaagacatggcaattcatcgtaataatcagtttttttttttttgatcagcaaaagtatatattatatatatgagaaaaaaggatagatacaaaaagaaagcagaaaacagtccatgataacaaaacccagcctatggcacactaatacatagaaaacatgaattaaggtgccataaacaggatggacctaaaaccccccagacaggtgagagagattaaacagtcccctgcttacaaaaaatatccctaaggttgcaagcccaaacgtggaaaggcatgtgaaagcctttctccaaatttttgcaccacaaccaacataaaaagtaaggtcaaataatcagtagaatatcattcaaagcttctattctcttctttaactccctctatacctaaaaccccataatttcaacagatcaaataagcactaaaagtaaggtcacccagtcatataatcatattttatgactatactaacataaaaaattatgcactactattcctatctgtgatgaataatattacactggtggatattgtagagcaaaagagcaaatttatttcgcagtctaccatttgatagcaattacattgcctactaatgagaaggtaatcacaaaaatatgacagtatgatacccaactataatcagttttaaaatttaatacatggaaaataatttcctaggaagctaaccttgtgatctgaaacccccttaatgccaggctgaagactcacaaagggaagtatcctctttacaagatcatcatcaacagtcacaacagtacccaaaacttcaacgaaaacagcagtacaaaagcgaattgcaggcattgaaggtcgagacttttttgacggagatgcctgtaaccaaatccttagccatataattatttgattccactagagaacttccacattcacaactaaacgcaaaacaattactcacatagttgcatagagcgtctaatatgcccttatcacggatgcactgctgcactatgaccattctaggcagccgtgcaccagaggctttcacaccatcaagaaacccccatttagtattccttcacataaattaacagaaacatcagaagcctctccaaccagtagtagtctacatcacaaccaaaccaaaaacacataataatatcttcctaaccttgtatcaagtatctgtactattcgaacaaattcaggctcgtcgtggtacggcaaagcacacaaaatcaaatcctcgttgttgtatacatgaatcctgaaactcaaaacaaccacatcaaaaatcacaaaaaaggtaaactaggcagaggcaaaatgtgattatcaacacaacacccctaggaagaaaacaattcataatacattgttgaaagctcacttgtgtctacgtatcaagtactcaagcgtttgaagggcggccgtatgaagaaaatatccagaaagtagtttcaagtatgaagcaatggagacattaagttgattgttctgttctattcccatcaactctctatccaactctatacgcctgtggttaaacaaatcgttcttatggttcctgaaccgctcatccatgccaataagaatctctaagcctgaaatattgcatcacataagaaaaacagaacaaaatcaaacgaaaatagaatataaagtagcaccgtaattcatatgtattaagaaaaacccaagtccgacgttgtctagagatagtgtcaagatagagtatataagtgggggataatcctcaccctatgagctagcttttggggtagggttgagttaggtccaaacccatattctaagaatatgctccatgttaatcactgagaaattaattcggtttactggattgctttagttgcactagctatgttgaaaagagcgaaattaaaaatgagaagattgacctcgaagagcttcggtgaaaatagcctcggtggagatgtcagccgcttttttgggatcatacaagatggaagggcgagtgagtggcctcttgagagggtcagagtcggttttggcgaaggatctgatagcttctaattgcgacgctatggaggacgccattgctagggtttcgtaccaaaacgaagcttaaacgtttgattttggtttcagttttggttcttctgcttatgcttcttcttgctgtctgcagaacttaaaagtcaagagtgtgagagaaccaactgttatattgatttacggctttcgcgctgagctgctggtagggtttagggtttttgtgtttaccaaccattaatgtcccttcctaaacgacgtagttcctctctctaataaataacaggctgaataatggtccactttaatcaatatttttatttaaatataaataaatagttaattttttatttgttcttttatttatttatatgttatttaatttaattataaaattttattgaaatataaatataggtagaagtctcaaatcgaataaatataaaaaagttaaacattatataaataaaaaaaatacttataaatgtgagttttaaaattttaaattaagatatgatattaaatttatttatataattttaataattcattagtataaatttttttatgtttatcagacacaaaataattaaaattttatctcatactctaataattttatttttaaatataattacaatctattattaagtaatctgtatcctatgatttgaaaaatatattagagatatataaaatttataataatttatctttaaaatatataagtaattggttgtgcaacaaactcgtaaaataaagggagaaaaaataaattttgaatttaagaagaaaaaaaatgaaagacatggaattttgaaagaaaaaaaatcttaaaatcattttgtcttatgctttttctcatttttttttaaatattgcttctattttttctttttattttttatctcttactctttaaacaagcatacaatttgagtaaataattagcaaattaactaaattcgtatttttctaaaatgtaagttcatatctttaaccaaatatacagttagacaaacttcaccaaaatatattaaacatacaaagcatattgtttaattcatcaaagaattgtgtatattagaaaattgggttttctaatgttgagttaaatataatggaaataaaatttgagtcaatggacccaatactatatattaaaaggacaagactctacctttgtccagcataggtgcacatggataatttatgcgcacacccacatgattaagtttgaaactctcaacagtgaggagattgttcgtaatgttattgatagtgatttattgggatggatttggacatttttatgtttgtaaccttcattaataatttttataacttataaaaaagccttatatagtattaaaaaaaatacagtttttttatgaatttttcagcataaatttggataattttataagatttttttagtataacactcaacaaattattacactaaactcttgagattttctaatatttttttctttttttattgttgatcaggcttttcttttatttaatcacacataatatatttttcttttcgttaaaaatgatatacacattcataaatttcttcataaaaaacgtcattatgataatgaattttcaattgaattaacatatgattcattattttcagtattatcaattaacaaatatcataaatttaaatttttggttcaaatccaattgcataaacaagaagattttaatacagataggcttaataaattatgtgaagaaacattaaatgggaagacagaataaattaactattaatataatggaaattttatattggttacactcttttttatctaaacagtaacattttttttattgaccctaataacctataatgttttctaaaaattcagtgaagttattaaaactttgtaaatctataaaatcttctcaaattttataaattaatatgttataaatcttttaaaattcaaactacaaagttttaatcataaaaatatttttacaaaatcttaaaattcactacattcatccaaagtcttgtaaaatccaaaaggtttattataccaaactaatattctaaaatcctaatttaatacctatgtagcaccgactccgacacgcgacacgtgacacgacacgactcgactctccgacacgtcaatcttaaaaaattattgatttcgacacgttgggacacattttaatattaaatcatatttttaatttatataatgtatatttcatttaatattcaataacttaacaaaaaaattaaactaaactaataatatcaaattattaggtattaaaaaaataaaaatagcacaaaaaaaggttacaagattcactggttcaatctcaaacatacatcaaattaacaaattatcaagtattaaaaatataaaaaaagcacaagtcagatacaagattcagtttcaaacatacattaaattatcaagtattataaaaataaaaataacattatatcaaagattcacagtgaaagaaatatatcaaagaaattaggggttcatagatagaattaaagaaattgggggttcaaataacacaagccatacacaaggtcacaagcaattaaaaaaatactgcagaatacataaatggtttttttaataaaaaaaactaaaaagagaaaacctaaaaaatctaagctaatagcaattaaaacacaaccacatgtccacagtcaccttatctgtgtgaggcacgaacggcggagagaagagagggagagaaggagcgcgaacggcagaggaagagagggagagaaggagcgcaaacggcggaggaagagagggcgagaaggacgcgcgaacggcggagagaaggaggagcagcaccggtgacgcgaacggtggagagaaggaggcgcgaacaagaagggaacgagaaggaggcgcgaaaagggaacgagaagggaatgagaagagaggaacgagcagagcagtgtcggacacggtcaaattcgcgtgttggcgacggtcaacgagtcggagatgttgaccgcgtgtccgacaccatgtcggagcatgtcggtgtgtgtcggcgtgtcgggtcgtgtccgacgcgattctgcggtgttttgccgtgtccgtgcttcatagtttaatacatctgcagtttttatgttgtatttcctcattttatttgtgttattaagtgattttgtttaaattaaactgaaataaatatatttgtatggtatagtatcatgttttttttaacattttttcttttagtattgagaaaattaattaaattaacaaatattatttatttatatttaaatgaacaatgaaaacaaaaaaaaaaaatattgatttcagattttaaaggaataaaactcatagaaaactaaaaatatattttaattgttaagaaaattatgaaagcgtggtttcgttttatctacgaaacaaagcggaaaaagtgaggcaacgacatatttggtgatgtcatgaggatgggtgatgatagaaacaaagattgaagcggaagtacattgttgtctcagccaggtagttactgttactgttatcatggaactcaaacaacaactgcttcttctgattctaacgcttctttttgctattgccacgcctgaatacgttcgatctcttcctcgtaaaaccttaaccatcccatgggattcaatttccaaggcccactcctcttaccctcaacaggtcaatcaaactctttttcattcatcatgttcatattcataaataaatagtactatatcatcacccactttgtgttatttatttcccacttgatcaactcacagtacctgatttctttcgtattttgattggattatgttgttcagttgggagggttcattttttttttatagggtgatattttcaaaattattctctatttcaagttgttgactttaatttctacgtagaataaaaaaaatcatattgttaatcattcagaaatcgtctttgatatgatttttaagacagtgacgatgggagcatgtctccggggttcaagatatagccctgcacggtttctttggttatgaaattcaaagttgatccaataattttctgtcactcttgtattggatttatagttcatgatctgggttctagtcacaaatcttcaaaagacattttttattcgttatggttggtgatttcttatagtatatatctgtacagacaatgattattatttatcagctaatattatgtaacttgaacagtttgtttcgctttctatgaattatttgccaattctaggacaaatattctgtgaactgtcaaccgtgcttcctctattaagcaatcatatcagcctctttagttagtcttttatgcatgttcttttatggtgactattaaatttcagtttctttgataccaaatttttgttccaggtacacatttctttggcaggagacaagcacatgagagttacatggataaccgatgataaacattcaccttcatatgtagaatacggaacattgcctgggagatatgactcaatagctgaaggagagtacacttcttataactatctgttatacagctcgggaaagatacaccatgccgtaattggccctttggaagacaatactgtgtacttctaccgatgtggtggaaaaggtcccgagtttgagctcaaaactcctccagctcaatttccaattacttttgctgtggctggggatctgggtcaaactggttggactaaatcaacactggcacacatagaccaatgtaaatatgatgtctacctgctaccaggagacctttcatatgctgattgtatgcagcatctgtgggacaattttgggaaacttgtggagccgcttgcgagtacaaggccgtggatggtgacagagggaaaccatgaagaggagaacatactattcttaacggatgagtttgtgtcctataattccagatggaaaatgccatctgaggaaagtggatcaacttcaaatctctattattcatttgaagttgcaggtgttcacgttatcatgcttggctcctatgcagattatgatgtgtactctgaacaatacagatggctaaaggttagttgatctcacctattgatcaagagttactaaaaattggataagtgtaatccaatccatgaccatggaaaactacacaatcatgcttgttattattatttttatttgtcttttttacactactctatcattttaaaaagaaaagtactttggagtttggaccactttttttttcactctttaatttttactcatccctcatctacaggaagatctgtcaaaggtagataggaaaaggacaccttggctgcttgtgttatttcatgtgccatggtataatagtaacaaggctcatcaaggtgcaggggatgatatgatggcagcgatggagccattgctttatgctgccagtgttgatttagttatcgctggtcatgttcacgcttatgaacgttcagtatgtctttatgttttagcattttattttctctgtaagcaccatttagtagaaactgggttttaatactctatctcattgtcagaaacgtgtgtataatggaagattggatccctgtggtgctgtccatataactattggtgatggaggaaacagagaaggcttagctcataagtaagtttcacagccagaaacatcccacagaaatctgttttctgaatcctttattatgtgaaaaaaaaaaaaaaaaaaagctatattgaggtttatcatgtatgcagcctgaaatttgtttttccgtcattgttgctgcatgtatccttacataattgtttgttgacaggtatataaacccacagccaaagtggtcagaattccgtgaagccagttttggtcatggtgagctgaagattgtaaactccactcatgccttctggagttggcataggaatgatgatgatgaaccagtaaaagctgatgatatctggataacctctttggtcagttcaggatgcgttgatcagaagacacatgaactcagaattttgacgccctaaactcagaactacgtggattagcaaaagttatgtaaatattgatgattagacaagtccttagtttagtttgtatcactactagcagcagagtgagtaaactgaggtataaggctagttgtcactttgcaagtgatggtgttgcttgttttgtctgaacttataagattggtttctgatttctatatagaaaactaaaacttagcgtacttaataaccagcaataaacatgtatgttttatattcttgactgacattgagattttagattatgattctagagtcatgcaacgagtaaagccgtgaagattactgggattcacgaaggtctaattaacaaaatgccttaaatctgaaatcattgttcgctgataccagggaaatgggatatgatagaatgtaaatcagcaatctaagaatagaacggtaaaaacagcagagtggataattaagcattaagtggaaactactgggttggcctattctgtcttgaagtactgaaactgatttatccaatatacatcaacacatgaaatctgctaaatagaatctaattacatttatgccatcacagtgattttataaagtgtgaatacaaactgagttctaaacaaatatctgtatctggtgaatttaggcaggtaacatctttccccttcctcctctcttttaggttttgtttctccatgttgttttgttaacaattaactctatttcacatcatcatcatcatcatcatcaagtggttagaaaatgggtaactttggcactgtcagtttctgctgaggtttctgtaatcattaatggtccagcttggtgcttgcaacgtctcttggcttgaagttgaaatcagcaagcatgagcagccatgattctgtccaaaagttctcggggaacatgctctcccctactttcttgaggagagactctagcaatatgcaatcacataatgtcttccattcagtgtaaacatgtaggtcaggtcatatagcagtagtaacactacaaactgcaaaattgtcttgattctaaagacatcattcagtgcattgtccaatcttaaaaatataattgtgctaaaacatcgatacaaattcccaccctcttagcatagttcaatttcaaccagtaactgattgctttatctcagactgctcctgtccttgttcagcagatgtggcacagcaataatctgttaagtttcaataaactcattggagtggagttctccatgcatatcattatacagataatccactgggattcccatgttgtgttttgcatgcagggaaaggatatggaggcaaaaaaaactcttacaagtttcatggttcataacttattgccaatagattctattttgggttgaagcaacttcttcgagttgttcaatcaaaagaagaaaggacctcaacaggaaaagtgtttgctcagtctctcctctttacagcgtctctgatctccaaccatggactcaaaagtatccaagagaccatccaaaccctcatgattcaactccccaactgccttcaaggcaaatacaatgctttcaatggtggacaaataaccagctttaggctgatgtctcacatcactatataagcttgtctcattcacttccaacttcacgtgtggcaaaatgttcaaccaaggattttcactataaattctttttgccttagcccatgttccatccagaacaatcaagttcttcacctcaaaacctatagcatccaggttactaacatcaacagccttatcagagggaaatagtagtaccgatccaggacgaacctcaagctcaaattcatcacattcttccaatttttcatccctattcagttgcttcctctgaaacttcttcaccaaaaaccctgttgagagtgcttcacaagcttcagggtacgccaaaatattgtcaaagcttaacttgggggattgacattgtgcttgagtcatccaaatatgagacaaagagctaatggcaccatatttgccaatggtaacagtaacagctagctttccattctcttcatgtacacctctagctaaatcacactttagactaattgcatttttctcaacttcatcgttcaccacttcaccatcactgatactcacttgtttcacaacttctacattagaagcagaatccagaacatctccaacatcatttctcaaaccacattttccagcactatcggtatcaatcaagttagaatctatctcagaaagcaatttctgggtgtctccaatttcccaacactggcgagaaaacaatgcagttggctcgtttccagcatgaccggaatgggaattcggatccaacaaccgaattaggaaccgggcttcgaaattaacatcagaaacagttgcaacggtgagattcttgaggcccaatatagcgattctggtagaattgaggggatgcttacgctctagcgcgtgctgtaggatggttacatgcacagaattttggagacccggtgtgaggattcgagagcagagacacgttcggctgggtttggaacaagaagggcaaatgggtcttttagattggccctgttgcattgtcgacatcgaaatctccagggctctccgctgaaagagcttgtggctgtgtgaagggttgaacctgaaccaggtgatgctccggattcgggtaccaagaaaagccaccattattagcttgggctgctaccaaaaccctaaaacggtttgaatagggatttttttttttttttttttttttatgaattttaaaggataaacaatatttttaattcctaaacttttttcaactcttatagtttttatcttcaatatttcggaaacgggtcttggatcttggttcccagactttttttcctttaatattttggtcctttctttgtttccaaaagagtttaatgttgtaagtgatgacgtgatattttttattacttttttttgttaaaaattgtaaaaaattgtttggataaatttttttatctttttattaatatttattaatgatgattaatttttattaaaaaatttatctaatcatttttaatgaatttttttatcccagtcaaatattattcatcaacatgactcaaattaaatactttatttaaaaggattgaatttggtatcacttatatcaatgatttaataatttatttgaaaaattttaaatatattgtaacgacttttaagtgttataaattgttataatttgtttgaaacataattaaatgaaaatttaaaaatataaaaatgtgagttttttaacttttttttttgttgctaaagtaggttttaaaaaaattacttatataatataaatagagttatgttcaaaactatttatataacatgaattgtttttgccatgcaggatgtgttttcttgagtaacgatcaatatatttttttacattaattatatttagaatcgatgaaatttgtttttttaaatgttgtaaatataaaaaagtgtataaccaaaactagaaaacgatgcctcttatatgctaaaaaataaaaaattaacacaaagtaccatttggataacactttatcctaagtgacaacccgtaacatataagtaattttaaaactactctatttagtttgtttttcttaaaacctatttcctaaaaaaaatttctcgagaaaatttacatgtgagtatcttaaaaatgatgacattttgggatcactataaatgattttatatatttcatgatattcaaattgagtttcttaggtatcttggattagtgatgcccttagaccaaataggtgtcattgtaatttattaagatttaataaaaaataaactccttttataaaatgaattttcttaaaaaaaaatataacataacagtttaaaaaaatgagacggtagattgtgggaatgattcttaaggagcaggtggagggtttcgtggggtgttaatatttgacttgtgcattccacacgctcccatcgtcacttcccagttccaatctttcttccgattgaaggcatctaaggagagaaaaatgcacgatttctgcttcacgattccgtacggattgatgctagtgggtggtggactgttcgcctacataagcaaagggagcatcgcttctctcgccggaggcgccggctccggtttgcttctcatcatcgccggctatctcagtctcaatgccttcggcaaacgaaaaaactcttacctcgctctctttctagagaccggtatcctataatttctttcctttcattattattattattattattattattattattattattttgggtgtgattgttgacctggctctcgatgattctggatctgaaacgtgttctatgctagaatttgttatttgatggaaagatgtggatatttattggattcattttttcggattgtatgaaattctggatttggattctctctcttaggatgtcatggtgatatttagattagtaattccatgttctcctaaaataatgcagctcaagtatcgacttatgaaaactttaagatgcatatgttgttttaacttgtgggagaagtctgatctattttattttaccctctggatttgcgttaggtgtttgttgaaatgtttatcgaaactctgcctaaatgctctttgggtttcaaagatattgaatgatggtgctttttcatttactactttctattgaaaggaaggggatttgttaggttaggttaggataggttaatagggtgtctacctgatggagggaaagtgatacatagatctgaaagagggtgtctgtgcacaatattgaatgccaaggaagcatcaatgaatgtatgtaacctgatcaagatatattgggtgcatggttttcaaatttccattgcttatttatcagacttggatcttgccccatacacttttgtcattagtatagttgatgaagtggaacatggtttgtcctacaagactataactagagctttttgctttagcttcgaatataagcccatgttttagaatataatgataaatataaaagatcaaaggagggggatgtgtttgtaacaaatattattcgattgaaagtaaaatttcttgacagaatttttttgatttaaaatgcttatgaatataacaagtttattatcattaagttaatgacttgcattgctcctacttagtaataaaaagtatgcacagaaactctagcaggggtatagatgtatcacattgcattatcatatgtcaaaactcaaaattaagcaagaatattttagtaagtcataagttatactaaattactaccaatatatataggatcaatgagtatctctgtgtttatactgggaatgtatgtctgttactctgtattcatttgataagctatgatattaagggggtcttgctctggttgagcaagggtgcatgagttgttgtaaactccctgacattgtcttcgatttctatggataaaaaaaaaaaatctgataagccatgatcactgagttaattatggtccatattagccggagtaattttctatgctttttttttctaatttgtatactgtgaaacagcttgtgcagccatactaacttgggtcatggggcagcgatatttggaaacatccaagattatgcctgctggtcttgttgctggaatcaggtaatcaaaggattgattagaagtacccaaactcgttgtaaacatagttttacttttactctcagagttgtaagaactaaatttaaacttttaagttttaattgttggataagttgttagtttgtagattataaatccttgaacttgtctttcttaaaagtaaatgcatccatgaaagttctttaaactctttttaaaagatcaaggcttcaccattcccatttattttgagaataaaagaaatatttttatgtgccattatcctgaacttgttttctgctagttctaaaatttgtttttaacttcccattactgatttgaagatctatatattatgttctgaatttgaagtcaggaatcaagcactggcagccattacttagtttatgttttgtgagtttgtccaattgctccacatcagtcacctgtagtttgtatatggagttaagatatttgtctgtctttttcttgcagtgctctcatgactctgttttatctctacaaattagcgactggcggcaaccatctccccaccaaggctgagtgatgatataatgatatatcatatatttgcttactataatacagatatgttggttgatctgcatgccttagatggttaagatatatcattgtactttagtgatttcaaagtatggaacaatgttgtgttgtcgttgtctttatacacgtaggagaattgggccagtacttcatcactctctaagcagctctttttattttctactttcctttttctcttagcttagcacaccttatcactgaggttgcttaaattcaaaactggctcttatttgttgcatactcgacaaactcgatggaaattccaattgaaatttatcaagcctttttatttgactggtcaacaaatttacatttcttggtgtgagtctactttaaatatggaataaattacattgtcaacaactagatcaggttctaacgcgtgcctcccaggaattaaatttttgcttattgcattagctaatacttgttgtgcttatctaaccatgaaattaaacttgtgatgaaaattctttaaaatataatttgtaaaatcatttttgaaaattgtgttttgaaaaaaagaagggagataaagtttatttggtgaggctgttttaaaacagattttaaagttagaaaacaaaataagaattaaataaaaaagttaagttttattgataaaaaacacattatcaaacatttatttattttcaaaattagaaactgttttaaaaggattatcaaataagtcctaagtttaaaaaataaaaagaaagaaaatagtgtctctccccctttcttcctaccgaattagccaatttcctctcattttcttcatctttccatgtttttcattgttgctttgattttgattctttctaagttccctttaaaattctaaaaaatcttttgagctccatatattttgttcccaacccacataactttgagaagttttttttttttttagttaaggatagcgtcctaagaagtaaaataagctagttattgctcaaaaatgaaaatactacatgagctctttgcggtatatccacaattcaaatttgagaaaaatagttttgatatgttttcaaatccaggaaaaatatatttatagctttgagtaccaagctaaattttatttataaacatattgttaaaacatcttcaatagtaacgtgggttaaaatagatctcacaagttagcactttttgtattttttaaatgggtctaattagtcatctcttaattatttttaatggttaataactgatttttttatacataaaacggaatgagctcatattattgatgatgaaagaccgtataaaataaggaatatgattataatcatgggaactaacattaacagtagttacccttgcaagcaaatggacaactacattaacttgtctaataaccaattcaactttgaattgaggaaattggtccataagttgcttacagctttggatgataaaggctacttctgtttatattcgttaaaaaaaaaaaaaaaagactgattcttatatacgaatgattctcacatattgcatccacttcatcctcatccaatggtgaactcagttaagaacaattcttaacttcaagaacacacctatcctgtcaaaaaaaaaaaaaaaaaaaagaagaaacaacccacctaaaattaccgctggagatgctattaaagccttggtgaatagttgtgcctcatattcaataggaattatctccgttatgattctagactagttggcaagttcttcacgatcgtagaagctcgagaaatctagaaaagttctggacttgatgcccttctactaaaattaaactttagcaaataccctcgagtgtatcccatgtaacgccaaaaatatatttaatcttaatatgtctacatggattgtttttatttaataacagcttatttatttaataattagccaacggtgaagatttgcttctcttggcattggcgccatttgataagaaagtagccgttagacagagagaggaggaaagaggatttggcgcgcgctaatgccaaaccctatataaggaaacaacagaacagagacacacactctgcatctgcatcagtgggtgaagaaagaaagaaagaaagaaagaaaggagaaaagttgaattggaactgttagaagagaacgatgttaggagggaacagcagcagtgagcttcaagatcatcatagggaggcactcgtctcgtcggagggtccttctctatccacgtctccatcggatcaagggaataacactctcactccgtttcttcacagcacctccattccggtgttgccagccgaggttgaatttccaagctctcagatcaatcatcactcgcggcctcctccacggaagtcccgtgagcacaggagatggactgaagaagaacacctgtactgtttgtctctctctcagtgttttctttcttaatattgctgtttcattgtttttctctcatgattcaaatctttataccaatatgtaggttgtttctccacggacttgagttatatgaaaagggagattggaaaaacatttcaagaaaggttgtcaagacaagaactcctactcaggtggctagccatgcccaaaagtattttcttcgtcaggcctccgataatagaggtcaaagaagaagtattaatgacattaccttacaagaccccgtccctcaccgcattgaccaccagaatttggttgcatcattcagtccctcacaacatcaatcagcgacattaggttccacgcagtgcaacactgaatcaaaattagcatgattgtttatattgatatctgttcatttacattgtttaaaattgttgaatacatagttagtcatgtttgaaattgttcaagaaaagttaggattaataataattgtggaaatttctgtagccgcagagttgatgtttcatctttgtgtttgaacgaaaatatatagcacaattttgattagtcttccttaaattgcttcctgttgtatgtgtttcatattctttgactttcataaagcgtgtataatatggtgatgatgtataatatggcattgtagacccattgtttgtcaaaagtatgacatccctgaacatctggtgatgatgttgatgtaagagaggtcgatttctcaatccatgatgagcctttgctttccatgcaatctcccgaaacacaatctgataacaccagccaaagtttggaagacatggcagtccattgtctgagatatttttattttagttttatttatttggtgtatgttgtcttcatgtgtatcagatttacctgatattgagtaagctttaatttctattttgtagagagaaagtgaaagagggagagagatagagatagaggggtatatgagtaaactttaattgggtactttataatgtataactactcctacctaatatttatattactaggttaagtacatacaagcacataggtcaagaccgtatacagactaaaactttactcttagcactcccactcaaacgggagtataaatgtttttcatgcccaactcgtaacaaattaaatttctatgcacttcattaaaagcttttgcaaatacatatgctagttggtcatctgtcttgacataattaagaggtagatacaagatttatgttggaccttatctcagatgaagggacaatctaccttaatatgctttgttcttttgtgaaagactagatttgatgtgatgatatgaatgacaacttggttgtgatcaccccgcagtttcataggacaagtattagcaagttccatctcctacaaattggtctcacgcatatcaactcatcagtcataaccactagtactgttagtattttaggaataagataattggattgattgtttaatggctgttgacgttggctttagagaggttagtaataattgacttagtcaagggaattgtatagaagtgtaatagtgaataattggccgtgtagctctcaacaatagtggaggagcttgtgttgatctctcaaaaaagcacactacaacagagtgcagattccatatttacaggcaacacttcactgactacatatgtgggtggattattaaataatattatacattattctagcattttcctaacttaagaactatcgagacatttctattatctatgtgactactatagctttatagaaaaatctagaattatcaagacacttctatagctttctttatatatacacacacatatatatcaattataaccattgacttcaaatatgcatgcctaagtaatgatggccctaaacacagtcaaagtgggcgaccacccaggacctcatatatagagaggcactcttcttcttaatttttaggtttaaattcctgcaatttagcattttttttcatttttgtctttgaaaaaaataatatattccagttcttgcaaaatgtgtgttttttcttcctcaaagtgttttagataacactttttttactatttaaaatatattttttactattcaaagtgatatataaagtattttaagaacgaaaattaaaaataaaattgcaagaactaaaatgaaacaaaaattgtacgagtgaaagcaaaaaaaaatattaaattatagggatgaaaaaaatatttaaacctaatatttgttattaactataccctttatacccataacattgttacataaccattattccaaaatgtattttctagaataatattttgttttaaacatctaagaaagtactttccgaaatgttaagtattaatttgtattttgaaaagtatttttcgtactgttatgagtttcataaaatactttacaaaatgttaaaaaaaaatggaaaaattcaagcagaacagtaggagtctaggaccattaaaaaccctatacaaaggaaaaattatacaatattgaagcaattcaagtgaaaaaacatataattggtaagggtccttcaatttagacaactctaaaagatgtttgctgcaacaacttagatatacgttgatgcatatataaaatgatagacattaatagtgttgtgagagagaaaaaataaagcaagaaagaaaagtagttgagagcataaacatactacattagattagagtataaaaatcctaatgctaaagcaagaggtcgagcaagagatcaaatggggatgaagaaagtaaagagaagaggaagcgaaatgaaaaagatggaaatgtgtgcaaaacagtgcacatgaatggccatgcaagattaattctcttgcaccgaccataaaataaaacaaataaaaaattagaaaacttacctttgtttaatgttccgagttacatggttataccggatttgaaaagtgatatatctgtattgcgctgcgttaatctatctgcaaatgtctatgttctttaaatggtaaaagcaggtaacacttacattagagtgctgaattggagtaaacactaaacaacgaaattgctactttcacaactcagtacagtttttgaagttctcaattcaaagctgccaaacccattttagagagagagagagaaaaaatgcagatgcaagacttacaaaatattttacatagcacttattaaagttaattttgcatgatgtacatatattcaagtcccttatatttacactgttgaatctggctacatagataatccgaattacatgaatgtctaatataagttcaagtttgtaataataaatacatacacgatatcgaattgtttgaatttctttttacattaaatggatacaaacaataattcatgtggcatctcctaagcaatccaaagctagaagaccaaaaactctggtcacacgcaatcagcccttcgattggaggaaaaaattgaagactgctagcaattctggggtctggagtactttggaggaagagatggacacttttcattcatatgagggtatggttgcatggtgttgtatccaggtaattccattctatacttgcctttaatttgacaataaggaagcttcaccgtgtctccatcattgcaccattttggcaagcgactagaattgttctcaaaaaaattgagaatgtaagcatcttttatctgcacttattgcacaaaaataagtctatatgcgccaggtcaatatactactgtaaagtgtttttgacttctagaaacacaaacaatatatgtagtgaactgatatcaatcctgctcaacaacctgatttcactttgtaaaggattttgttagaaatctatacaaccatgataagaaattatatatgctcaatcatttgtataaattgtgtaggatgaaattcaaaagttactataatattgcaagcaattcaaaagaccaaacttcccagcaaactcaccgtaaactctgtcacttgaacggaactagaaattggatcaaatagcccagcctccttgtacatctcaagtatataagcaatgcacgaagtcgacttcccatcactgtaggtccaataatcttgttcaggaatcgtcagtagttcatcaaaagatgatccacgcttttcaacttctactaaaacttctggaaggtcaagtccctgtagaaacacaaaagggccacatggttcactttttttcactaatgtggaattctatattgctgattgcttactaatctatgcaatatatcacatcacaagcatcttatgacttatgctagacaattgaagacattgattcaatttactagcataagcaaaaatgtttagtatcacatatgtatgtgtgtttgtgtgtgtagacatccattcaccaacttgtgttgtctcacattgatgacattgttatacatttgtaacatgtgaattattcgcgtagctgtgcgtattatttaaattcctagtttccacatttaggagatttcagcattaattataatacattttctgatcaagaaataaaattattatttctcctttttcaagtgtgtgtgtgtgtgtattggagcaagaaacaagattgcagcatactttagttccaagtcgtttgttcaaggcttcattccacatatttgctgcatattcaggttgaagttgactccaaattgtcataacgcaagcaacctgcagagaaacaaaagtaaatgctcattcataaaacattaagctatgtagcatgtggctaaaccaaaaaaagacagaaagggcagaagatagagaaaacaaacaatcaataattgataccacattcatcactttttttttttttatgtgaaataacattttcttcaatagcaatggtctttctggatggcagacggataactatacataaaccagcatatggtacggtaattcaagcaaaactttatactattcaagcaacttaagtagaaagctcattgagttcttgcaagatcaaagccatggtttatataattctctgtttgaaatatttcatacaattgctagaaaattgtaggtaaaaaatgctaaagcatggcataatagtgcaaaaactcaagatagttgaatctaatgaaacagatgaattgaaatttaagcagaacaactgattaaattaataccacattagcatccaaggggggtggatagtttccatttaaagtgtctatccaactgaatatcatgttatggtaaccatatggttttcctgccatgctcagtgcatactcccatgcagcagtctcattaaacctggcacgcaaatcagggtgcaatggaagcagagcaatatggggattggaatcatcttcattcagttcaaagtcccaccactcttcccatggtatcacagctattatatcttctccctgcaaacaaaaggtgaggcaggaaataaaatgctagcaacttaactccaaatgccgctgcggagttgacaaaccaatatggactatacttttaccatcattgctcaaacaatcaaacaaccatcatgaattatgtcataaaagaaaatctatatatgttaacttggtaatcaccatgcactaattttttatcacaatttcaaactgaaactgagagcataatcttgctattctgatgacgacatggtaacttaaggaacttaaaacaattcttcataaattatatcaaaacctaaacatcgcataggattcaagaaatgttaattttcttaaggaagaaaatataaatattaatgaaattataaaaaaaattgactatgaaacatggtagtgaaattgagattcaaattgtgaaccggaaggcctattttccagatagcaaattgaactgtatgattaatcataaaacataacatatacaactaaaaaagacataaaagcacaaattcattaaaaaaacataaacataggagcattttaacataaggaaacatattaaaagttaaaacatacacgtgtgttggtgggggggggggggggggggtgtgttagcattttgaagtcaaattgcttacaaagtgacataagcttcaaaacaaaaaaaaaaaaatcaccaattcttaacagccatatggacaaaaaaccagtagctgctcaaactcagcagtatgagtgtatgaccaccctaaataagagtggaccacaaagcttgcatgtagggtagattgggaaaggtaaagaagagtagaagacaagaagaatgagtagaaaacatgaaaaggagacaatgggctgccatgcggttgattagagggaaagaattggccaattccctctctttttcactaatttttcaggtaaagaaaaacaattttagggttcttcaaagttcaaaactgggtcctgcataacccgaaccactttggtgtgcggtcgcttgcaccaaaatcacatgattcatgtgcaatctacaattcctatgtgattcctgctattcatggggtgattcaagcacaaaatgtttcactcaaggaattgagtcaccaactgctcaaatcgaatcgtatgcctttgtatcgtgaaacatatgatactgacaacggtgctatgaaatataataaatcttgcacagaaccaatagatataatgcaacttaaatattttaccttttcattttcatgtcctgactctccaacccaaagcttcccattggagtcccttaggcaaacagcagtgtgaccagcataagctccactaacccacttctctagagtctcaaaagcaccccaccgacctcgaattttcgaaacggcaaggaaatctccagaatgaatgtcatcagcactgacatttgtaacaaaaggctgagggcgcacttcaaaagaagctcccatatgcttctctaaaaatttaatattggagttctccccccatccagtatttgtaaatagaggcaatacctcccaaagtgcttgaagggtccccaacatcccagcttgcaagaggaaaattgataacccatggttttttacctgattgcaaagaggataaggatctccaaaacaaaaatgtgtgtttcaagtttcaaaaaactctacttagtgacagtgtacagaagaaagatggtcacttacatactcatactcagctttcccttcccactctttgaactcaagcgtatgctcccgggccaggaaataataatcccatgttacacgataaggggtggcaaaaatataaagatccatgcacgtccaactgtgagcattgctaacctagatcagcacatagataattatcaatcagtttccgttgaatcccaaatccatacatagagagagagggggggggggggggataaaaagaatacaattatagaactgcatagactaataggaaaatactaaacatacacccaacttttcttccatctcacttctatgatctatcccatttttcttcctatttctcttttcattttccatcacatcatttgccacatctatcagttcctctctatttatttattctctttatctctcttatttccatccatacaccatatttggggagtaagagtttcattactctaatgacatacaaaatactgagcgacattaaatccacttaacttagtctcctctaataatttaatacgctttcaaatgacaacacgtccaaccaaaatccaccaaattacaactcaaccacataacataatctatgcattccaatattaaaaaaacactctttaaatcttaatgacacctactccctaagcaatttttttaaagtaaaaaaaaaaaaaaaaaactacgaaatatttcaagagtatgaccaatttttgttaaccactcagaatgaagatttcatgaaacgaagttgacctagtccttcaccgattagtattaaataaaagttcattacaacaagaatgacttatcataaaatttgatttttttttttttcaacaaaaagaagtgacatagatttccattcccacacttgagaaggaagcgaccttgatgtgaagggttccaccgccatattgagagccgctcttgttgtgaaacaccatccaggctttgttctcgtagaagcaggcgcctttccacttgagactgtcgtccggcgaagaggcggcgccgacgaagacggggaggagatccaccgctctgtggaggcggttgaggatgggccacgacacctgtctgggcagcagaggaagcacgtctcgcgggtgaaacggcgatttcagggcccaaacttgagaacccgttacgcagactgataccaggaggagcagcagaagccacgctatcttcatcttcgccgtggcacgagcacgatcgaagaaaggagaagaaactcttttgaatgttttttgagagtcaactatgcatactttgctcctccctctattttgtttggcatacaaattattggaattttttcgtgtttatcttaattaaaattaaaggtgaatttaactagttgattgaataaaaatgtatgatttgttatcatcttcttataaaataaaataaaaattttaaatttataaaaataaataaataaatataattttttttacaaaatattattactaatagtaaaattttacattgtcatttatcaggggccctaatcaagattaattaactaagggatgttgattttttaactaaaaatctgaatttcaagttctctatgaaaaattatatcaaatacttaaaatgataatttttaattgcctatatataaaagtgtatatctattaaatttaagttgtaatattttttttaaaagaaagagagatatatatgtcattttattcataataagaaaataaatataattgagtatatgatcaaagatataaacactagcatataatttatatgctcttattaactagtgaataacttgattagttagtcttttaaaaatctcaccaaaaaattaaaataaataagatctatatttagacaaaaacgtgtggaaatctgaaaatattaataatctaagagcattgttggatacaaaagatatattttgagctcccataccataaagtcgtatcaatgctttgtaagagagcccatgcttttgctccacgagggttaggaattccaccttgataaaatgaccatgtttatctcaaagataaataacaaccccataatagttatgctccttcaagatgacatcattttcatatacgttgttgcatttgagacgaccagttgttggtgcttcccatgatagattaattcaaattaaggaggctgaggttgcatgttgatgtcctttgtgattcttcacgcatgcttcaattccattcagaaaagtgttgcaatgccataaaaactgataatatttatttgtggctgaagctcaatattattccatattttctcattttgcctttttcaaatgcaccataaaataacaagaaaattgcttttaacatctagagatgccaggagattgaatattaactcataaattccttcaatgctctcactttgtttttaataactcgtcataatccaactgactcccatactttctcaactttaattgaggacacctgaaaagaaaatggatcagtcattcaatattataagttataatattaatatttaattaaaatatattaataatataaaagttcttatactaccgtttatatataaattaacgtacgtgtataataactttattgaatattataattactgtaaaactcatatttataatatttttaattaattaataatatagaaattttctgttcaatttttgtacagtgtgagtataaaaaggtttacagtgttaattgattagaaatgtaataagtatattttaaagtaattattgttaaaatcaacaaatttatagtacatgcattaaaaaaaattaatattgtataataacttatgattgattaattatataaaaattctttaagcaaatagtgtatacttactcaaatttgtatactattaaaataaaaattaaaattatgtaaacatacgaagatattaaaattttgaggttaaatatcaagtcttgcagttgcagacgtatgaaaaaaataagttatattaaaaataaaaaaagacagatattttgttggttcggatgagatgagaagactgtgataatcataggtgaggtggtgattggtgaattgaaaggtgtccatgtgttcaaataatgtaatactacataactacaacccaaaagatcatgttactacaaaaaagatggttgaaataatataatgtgtgatgatacttatccaacacgtgtttaaactataaaaatgatgctaattacacagcagagttgtttaattaaaaaaaaggtcgatgtaatcaatggctgtcgtaattaaccaattgtttgatctctcaacaggcatcatatataccgtatataaatgtcgcattaccacatggttagctttcgatctcatatgtttgtttttctatgaaaataatggtgaaatatattttattcgagttagtaatatctggccaaacatgtgtgtttctttcttactagtcgtgttggaatttttaaaaggggttcatacttattttgtttcatttatattttcaaatagattaaatattcgattgacacgataaagataaaaaatatactttaaattaagatagagactaagaattatgaaactcatataggacctacattattatttttaatatctcaaccaaatataacataaatgccaaaattaagtcatcgatcctagtaaatttataatgtttgtaagataaaatagtagcttaatctcaatatattcataacataattatttttttatcagtgtgcaaataataaaattattatttttatacattttttatatttaaactacaactagatagatttccataaattacaaataatgctcaacacaactacttgtttaacataattttttttagctaaatactcatttttgtctcaatatgtaaaacataaataaattcattcttaaaagatacaaatttaaattttatcctccaaagtgaaaaaaaatgtaacacatgtgtttttatttgaatctcatatttgggataaggtattctcagattagaaatttaaatcaacaaataaataaattatgtttattattatgtttgttttaacttatatttgttttcctttttttaaagtatttattgtattattatgcttgcaacaataaaaaaaaaagagaaaagatgaaaattaaattatattttatccttaaatgaaacaaaatttagtatataataaattagtccaataaaaatttaatgacattttggttcaataaaaatttactaacattttagtcaaatctatatattgacaatcatttttatgacattttcgttcttatatgacacaaactttttcgccaataatgaatgaaagttaacagattgatgaatttgttgtacttctttcattttcaaaaaataaaatttgaaattttattttttggagataaatttgtaagtactctgtacatataaaaaatgattatttatcctaatttttttaactataaatagaatattagggatttattggaagcttcaggtttggtatattccctttataccattaatatatcttataataatgttatttttatctatctgtttatcgaattctgctcccactgttggctaatcgtgcaaggaacatatttacttagcaacaatgtcgtgacaagtttggcaagtagacggaaaatctaaaaagtttggaaaaccacgccatccaataaatttcaaacaaaacaaatcgtgggcgtcaaagttgcaattgttttggtgaattggtgaccgtagcagattgctctgtgacgttgcacaaaaacttcaatcaaacaaagaatacagtactctgcacaatatattatagaagtaataaaatatatactaataatttctaaaatcagagtggcgcagcggaagcgtggtgggcccataacccacaggtccctggatcgaaaccaggctctgatataaaagagaaaagcttcctatactttttttaatttgcagatatactcttatttatttcaaatcaaacaaatacattcttcctattaatttcaaacgaataacatttattcacaatacatatcttatcaattaacttcatccccttttcttttacctttttcatatttcataattaaaatataagttttctttacatttcaaaaaaattgcatattcttttaccaattaaattttaataatctttttttgtgtatgcatcgccactactttgcacatccactaattaattacattttccaaatgcaaattattgctcttattatgacatttgttaaggaaaaaaaaagaaaagaaatgtacttattatatttagaacaatttttgtttaattcttatttttatgaaataaaaaatattcagagtgggtctaataagacatttcaatttgtctataatttattttaatatcttataaacttatttatccaaaattaaaacgttttgcataaaaacaaggacttgaaaactttatgtaacgaaaaagtgaccgaagatctaaatgtattaattaaaaaaactaaattcaagtaaaaaattgtttgtaaaaaaatacatattaattataataaagaaataaaatgctgttaagcaaaaataaaaatgatgtcatactaaaaataacatttctctttaaatttcaatgtaaaagtgaattgtgcaatctttgtttgttttttaaaattttgaagagaccaatattccaacctttagcgtatggccttcgagccttgtttatgttagaaaagccacctacacaagcaattagtatatttggataaacaatttaatttattaattgcttattattttttattatgtaagagattttgtctaaattttaccataaaacttattttcataaacttcgtcaagaaagtttatttttttattataaaaaagtagttaaaatatttcttttctttactatcccaaattcatttttttctagcatccaattgaattggaatatgaaatatcataataatgataaaaacatgatgtattttttttttatattccttaaaatgaaacaaaatcttgaaatacaggttgaatttttcaattcatttcaaaaattaaattctatctatttgttttgttgtaataagcatttgtggattgaatgcaaaaattattatgagttaaattataaaaaaacaaattaaaaatgaatattcgtgaacagtataaataccaaaaaaaataatgattattttcttgatatactgagatctatttaataagttgacctctttaacatatatttttaaatacatataaattatggataaaagatcgaattcaaattcttaaccacgtgcaggtacttatgaaacaaaattatataccaactatgtgatactatgttggtgtcaagaaagttattaaaagaatttgcaattgtagtggaagactacattagagtatcaactgctctctctattttgctgggttgctcagctggtagcctcctctatatggtttggcttgtgtcagaatgatggcattttggtttttctttcatttggttaacagatcacatttatttcaatgcttatttttaaattttctctttattatgttcacccctttgttggaaatatttcttttcacttatcttttaaataaggagtttgaaatataatactcagtcctcgccaatatgtatgcacttttactttttaaacatgttcaaatatagtacttggtttttttaataaacaattcacacaagatagtaccctcttcaacgcttccccagtgattctttgatattcagtgcgccctaaatctttcaaaaagccatgttcaggttcgacaccaagctgttttctagagagaaaaaaattgcacattcaacatatctggttcatctatccatttttccaaagctagcttgctttctggtttccttgtcaattgtcaattactgcatggaactctcttaccatcacagggtactatacatatgactcggcaacagaaacataatataattagttgtctctacattagtcaccctatccattataacttctgaggcagcatcctttggtatatatcacatatctgaaattaatattgctgcatacttggaattatccaagctaaatccgcacaccttacctaactttttttgtcaccaacacatgcaatcaacacatttggtttcttatgcatttttccaaagcttgctttctggtttacttgtcaatcactgcatgaaactctcttaccatcacagggtatggatatggcccagcaacagaatccataatataatgagttgtctctaaattagtcatcctatcccttttaacttctcagatagcatcctttagtgcatgcagtagttccatgaaggtcttaatacattcaacacatagcaaactaggtttggactttgtacgcactgtcacatcctaaataagaaaacacatttagaagaaagaccggattagaagaactaacatttcaaatggtcactattgcaagtttgcaacagcagcgtattcgccaaagagtcccacatcagttagtcaagaaagcagcagaacatgtaacagaaataaaagcaacaacaatatactaaccaaagcatgcctttctcggccttttgacagtgtagtatctgttcttatcggtttaagtattcaagtgtcgcctatttcttgcaatacagtataggcctggcacaccctaccaaattgtttaatttatggttatattgtttgtgctatctgcttgtacgatcgaaccattagaaatgattcactataaaacctattggctattagagaaaaagcttggttcttgtaatacgttttgttaaaattgtgttattgaataatatttgattggattagtattatgttgtgtacattttattttattgttttatacttaaataaatggatatatattatccctaggcacatgcattgaattatatgatacaaaggagttagtgttttcttggcagaaagtttattgaactttggtgttttatgcagattcactgaagaaattaggcacatttaatagttaaattagtactttttttttttctctttcccttttacttactacttaggtatgtagctatctaaatcacttgatattggcctgcatagccttgtgtgatacagatgctactgaaaatcagtttaccataacaaaagtagtcatctgtaatctacaatttagattttattcggtaaaattaatatacaagtgagcattatatccaatgtaagataaaaagattagagtttatcagaaggaaaatccaagtgccaatcttattaaaacctagctaataatgtcttaacctcattgtaaaacaattaaatctaagagaagtcaagtccctagctgaatgccctggcagagatttagaaggtatacatgactaattggagccatttcttctaattccatgtgagtatagtcgtctcacagtcatagcaaattgaaatccttttagttggggttataattggattccttgtgtcattattagatgttacttttgaaggcttataataactttaaatttacttagcattgcacttttcagaagtattgtcgttccagttcatattcctaaaatcattttatgttttagtcttatatatatgtccacagtccaccaattgtaccacatttaggctccacatagtgccatattttaggacagaagttgatgttcatatatagatgaaggttattaagtcgaggcctatctttaagacacattttccctttttgcttggtttttgtttaccactatatggtccccttttgcacttattgttttttttttttaagttccctttgaccttattgctaacggataccattgaatttaattgtaaataaatacattattcaatacagtttgaggcaggtgaagagttcctaaaaaaagttgccatgttaatgaaagacctgaaaatttatcacgatggctttgtgcaatttaattcaattttttccccattttaatgtcctgatcgtgtagcatttacagtttttgtttcagtaggtgatctagatacctagaaactttaattagggcaagctttcactaatctaagaacagattgctgaacctatcttctgattattgtcgattttagatcctttaattggagctagctatgttttattgcttttgatttcttcagttcaaatcaaagatgaagctttttggttacaataatggggaagaaatcattgcaacccttgttggtaaaaagagtcgtatgacggaacgcaaaatcagcaaatattatctttaatttaatttattttttgaatgaaattttgaattgatacttgtaaaagacgaaataaaataaaccaatgaggtaaaatgaattaattttttttatcaaaattaaaattaacttgtatacttcaatttctttttaaaaaatcttatttattttctttttaaaatacttataaacttagaaattcagcattttggtcttaaaaaacttgtaacaagatattacaattgaaaagttcttattagttaagatgtttctaataaataattgtgaatgtatttatttcattatctaaattgcatttcttcactttagagaaatcttattttagagaaattaaatcctttttttcttagttcccatattatagcagccagtgacaaataaattgacataaaaattaaaaaagttaatcctactattattctaacaatgatacatatggcagaaaacatccccccccagaaatacacgatttcatctttatttttctccttatccatccgagtaatataatatttcaatcttattgttctttatcctttttctcttctctcattttttttatatgtccaaatccgaacagagtataaatgtaaatacctcatctaacaggaattagaatcacaattgctgtattttttggaatctcagtccccccgctccctgccagttttcatgaaaaattaacaatatattagtccaaaaatgacgtgctcaacaaaaacataactttaaatttcggcatatcacatgtttaatagtatatcatattttttttccaaataatttttgaatttggactgcaagtttcaaaaaagaatatattctctggaatctgtgatttttgttataacatcaactttgactgactattaattttccttgcaaaattggctttttattagtgttccttgtctttggaacgtgtacagagtgagtcttttctttcctttttttttttttaaaaaaataaacacttaattttctccttcaaaaattagagtattgctatattattttccccaaaaatttggtaagttaaatatatattaaaaaataaaaataactaattttatgtcaccactttatacagaaaattcagtgacattttagattcataatatttgaaggattaacataatagcatactaatattgtaagattaaaatgatgattctaactctattgattgaataaaatatataagttgttgttataaattctaagtatttctcttctatttgtatggataaaaatattacaaatattttattttattgaacaagaatacaagaaaatattcatttaatcaaagtgaaaaaaaatccttatatttgtataagttaggaatacagatatgtagatgggtaaaattataatttaaaatgtaatatactacatataatattccacctaagtactattaaagagattggtatattaatgaacatttaagtaaaaaccaattttttttaaaaaattgatgtctcatcatatcatttaaatgagtttattgtcattcaaaaagtttaaagaagtattgtatagatcatacacaaaattaggtacatgcttaatcaaacagaatataactgaggtagataggaaggatacaaagtagatataagctgtccatataaaatagttgtcataatttattcttgactagtttcattaaggagtgatcctctccattttggttggcataataaagtgcaacctaagagagaacacttaatgaaatcctatattgaggaactttagataatgatattaaagatgagtgactccctaacggtcatttttggattagcatatttgacattcatttcttttcctaactatggcctttgaataacaatgaaggaaaagtaaccatgccatatgggaaagtttgtgtgaagctagaactcaggatcaatttggtttctgcagggccaatgtttcaatgaaaaacttcctaaattgatttgaagccacttctggagggtctaagactgcatgcattggatattggctaacatttgcatgctaagagacagatttgaaaaacagatgcatgaatttgcaattctgtaaatgtgggtttggttagatcaattatttaggagtggaagatgagtttcttttcatgttgcacatcacaagagaagatcgacaataactcattgaaaaggagcagtaagaactaccatcacgcaaaagctctgccatgtttagccaacatgtgttttaaatctggtatttttcctagctccaatgctaattttctcattgtatcaattttcggccacattttttcaatttaatgtctcatatctacagtttaatgttgtttccacgacaaattattttcctctagcacaatcttatttatctcaacatgaaatcctaaaattgaaatccatgaaaggtttataccatcacaataggcttcatcaactttttgattattatgaagcctcaacgatgtgaaatgcagaagtacatgcatatcttgtgcatctctttaggctcccttcctagtttaatgatgttcttagcttgttgataacatgttttgaaacaatttgtgccaccaagttcttacagattatgtaccaaggtcttatcatttgacaacaggattcaaactcacatccttgtgagctatgagtttatccttaccaattagggtatcataaacctaaggatctcttactctcaacctcaatagttgtgtctcaattgttaactctggagttttgactttttacaatatattgctaagctaaaggtgcaaagtggtcttatagtgccctatatagtggatttcagctttctcagacatttttttctcaatgatgaatacgatgcttaaaacttgaacaaatttatcttgtagataccagcaaacggaagtacatagaagaagaaatagcaaaaattgggaaagggaatattacctctcagactttttcttatcacgagttatgtgttgcaactcggaactttcaccctgacaatatgattggtgaaggaggctttggaagggtgtacaaaggacgcctcaaaagcctaaatcaggtataacttcaactcgcatctatgtgaatattatgctaatatcatgctaagaaaaaacttctaaatgctgtgttcctttcatgcaggttgttgctgtgaagaaacttaataggaatggattccaaggaaacagggaatttcttgtagaggttttgattttgagtctcttgcaccaccctaaccttgtcaatttggtagggtattgcgcagatggtgatcaaaggattttggtatacgagtacatggtgaatggctctttagaagatcaccttcttggtaagtaaatgcttcttatgtcttctaatgcatacatcacggataaaaatgagaggaacatccaatttgagtatcaaacttcaataaatgcaataaactaagtgtagtctgtagtggcagtgtgaccagatgagcacattggatcatcatggttattacttattagttacaacataaaacaatttgcatattgatggttttaagtagattatgttttatctttccatttgtgtgagaaaccaaatatatctgcaagactggcaccgtggaagttccccttttcaaaacattaccctagtatttttatttttttttgtgataagcatgctaaatgttatctgaccaacaagaaaagaaaaatgattgtcagaactacctccgaacagaaagcctttggattggcgtactagaatgaacattgcagcaggtgcagctaaaggacttgaatatttacatgaagtagcaaatccgcctgtgatataccgtgatttcaaagcatcaaacatactattagatgaaaacttcaacccaaagctctctgattttggacttgcaaagcttggtccaactggtgataaaactcatgtatccaccagggtgatgggaacttatggctactgtgcacctgagtatgcctcaacaggtcaattgactacaaaatcagatatatatagctttggagtagtgtttctagagatgatcacaggaagaagagcaattgatcagtcaagaccatctgaagagcaaaacttggtcacttgggtatgtcatgaagcttttattatgtgcctagaatcatatttctctggcctaaaatttcaggatttataatctaatcaagggcaaaatgtatcacaagtcccttcatttttggtcaaaattggttttagtccccatattttaaaaataataattttgttcatcgtattttttgtaattggtgaatttcgtctctgaccctagtatcatatgttacattaagagagatgactataaaaaataaaatcatggtttttaaaatatagataccaagattaactttgactgaaaattgagggacctaaaacactttttaccctctaatcaatatgaaaactagtccaaaaatttaagcttagaccattaatatgcacaaatgttcagcaattgacattcataatgtttcttgttttcaggcacaaccactattcaaagaccgaaggaaattttcatcaatggctgatccattgctgaaagggaactacccaacaaagggtctacaccaagcaatagcagttgcagcaatgtgtattcaggaggaagcagatacccgacctttgattagtgacgtagttacagctcttgatgttttagcaaagaggcatatacaagtgggaagacaacaacgttcaaaagagacttttttcgagcatggggaatgtagttgacaaaacgaacctgaaaacagtagaggattacagaaaaggacaatgaatgaaaaagcagctgctaatgaagtttgagaatcattctataaaatttcttaatgatgccacttggtatccttatgaaaatcgatcaaaacggttacatatttttgcatgttcagatttattgagtagtagtattagataatagatattgataatagaatgacaagattgttaccagattcataattgcctactcttcgagattctctaatcaatactgttacaacgtttcctttttgtttcagctttcataatggaaaatacccactcgacaaaacatttgactccatatatcttgtgttgttgatcataaaaccaaagcagtgaggtcaatgcaattcctttcctccttaaactggcttatctagagtaaaatggtttcatgaagagtgttctggtctttcagatgataatgaaaaatggtttccagttcaaagtggaaacctccttttggtttgacagaaagaacattatcatccatcattagtggcagaaataaacttgcacttaacataaactttagtctatcttcacaaaataaagatatatatttgctaataaggaagcaattcatcttgtacacatggaaaagtcgctgaagaaatgtcttcaaattaaccataataaattacattgctctctttggtcccactttcaaaaaaaagaaaatctacgttctcatcctttaaattgcctctctcaattgcacataaacacttgtaatgtctgaaaattcacccatttcaggatacagtgtaatcaagggttgaatgaagatggcctagggctctatgatgctctcataatagattacttagataatttaatattaaaaagaaaatttcagtaaattttatattatttagtttgttttatttatttccatcaaataatatataagataaaaaaattatctagtaacttgacttgtgttgttcttatgttgtatccattaaaagcaccctaagtgaaaaataattgttacaataaagtaataaaatgtacaattaaacaaaaaagtattaaatgagttttataagttttcctacattcgtatattttatctatttttatgtcaaaattcttaacattgagacaatgaaaaatattttgaaaatttagcaatttattttaacttgtcttttaatgaaataatttattgaaaaacataatcaattctttcaattaaattttattaaaaattgcaaaaataaacattgcataaacaaaacaacattgaaaataaataatatagattacacaagtaggttacataattcaatatttttctcaaattatgttatatagtatcttataatctttatattatttcttcagatgtatttataaatttataaaaaggacctccaatttttgttttaacttcaagccttttttcttaacagcacttcaagactttaaccatccaatttttatttgcacgcttcattatcgtattttttaaaaaaattttgtacattttaccaattcagtgaataaagtgttgatctgtcccaaaaaaattataatttttttattacttttttgtggaaaatgacgtcattttgttaaaaatataatgataaaatgtggaaaaaaacatgaatagtaaaatacgtgaaaattgaagataagatgataaaatgattaaaaaaaataggcgataaaatttacaaaataataacagttaggtttgtaaattatgcaattaagcattaaaaataaaagaaggttatttgataacaaaatgacattgttccatttttttcactatttttagggatttattagtatgtgattacatatttattataattttatgtttgtaatgaataaaaaaaataaaaattaaattatattttaggtaaaatagtgataaattcatctctaattatttaaagtgttgacaatttcgttttttagtgtgtaaagcgcaacaaattcgtccatgaatatatcatctagactctttcattaacgataatgaatgaaattaatggattgatgcatttttttaactttcaagaaatttttttaaaattttgatatattagaaatgaatttatcaatatcatataaatttcaaaataaaaatgagtatttattcataattttatgttaaaagcacaccaaacagcacctaagactcctatttatgcctccgccgaccgagagggcatcctagccttccaatcataagattacgtggcaattaaatattataacaccttatttttatttggggttttattttatacgtattttatattaatggccaaggtttttcaaatattttgctccttttttatatatatatatatatatatatatatatatatgtatgtatgtatgtatatttttatatattatatattcaagtagctggctcctaatctgtttaactgtggagggagcaggagcactcggaggtgatttctgcctcaatggaggtctctgctttaaggccacactgccctttatgccgccgctgcttctcaagtcccttctctcttccttcccttttaccttctcagcctctgcagcggtttaccctttttcctttatctttttttcacttcaaatttcatgtcttttgttgcttctgacctcgcccatctctttaatatccttaaattttgcatcttttccaactgggtattctgcttttagcttaagaaattaacgtttttatgttacacagtaaaatatgctgattgttgtttttttgtctttacttcaatgggtcagtgtgccttgttgttcttcactggtttgaaaggttgtgactggtattaacattaagtcaagtgtgacttttcaaattttacttgtattgtaactgctgtgacaatttgttgatgataaaacctgaaataggttaatattaaggattctatccggggattaacttttgttagtaaatgtgggaatagagtgatgaagagatatattttctctttgtaccacacatgcctacagatgaagctttttcttagcttgtggatggctacatttcattgattggaacctttatttttgttgcatgatgtgaattgcagaagaaaaatgcagtcattccaaatttccctccgaaatagcgctgtgcttagaaattatgtactatgtagagcagatttctcatgctgtctaaaggggatatctgcggggttaaataaatacaatggcgtgaggtgtaagcgtaattttctgtgcaagagtccagtttgcatttcatctatgaaaacttcaaatgcatcaactagcacgttggaggaaatgactgaggaggaagagctgaactctttgcattcatgtgaagcccaagttaggacgatgggcatggcttcttgcaacaatgaattttccgaaaccacttcaggaaaaaaattgtctggtggtgattatagaggctggactatagcaaaagataagttaactgaaaataaaaaggaaatgaacggctcaaataaatttgagagtgaaaatggcagttttagtgcatctaatggagttgcttccattgatcagaaccaggctgttccaaagaacggggatagcaatattgtactgcaggattctggtgcacatgtcccatcttctgttaactattctgtattaaacaattcaaaggtgttaatggattctgaaagggtgattcaccagtataacggatcttcattggggattggtaaagaaaaagtccctgtagtcaatggtgatcatggtttggatggaactgcaaaggattcaactaatgtaacacttactaaccaggcatgtggtactgaccaatcaaagctcctggataggctttgtagtatatatgatgatattctggttgttgataatattcctcttgcagaggaagttgctaagatgcttacaacaaagttccagcatcttatttatgcatgtgataccgaggtataattctttttactgtatttacttgtattatggttactccatatcacaagattatctcctttgttgcttctgtgcacgtgtgtttgtttgtgtactttggacatgaattcaactaatttttatttgtgtaacacattatctgctgattttattgtcttcaaaggtagccaagatagatgtcaaacaagaaactcctgtagatcatggggagataacatgcttcagcatttattgtggtccagaagctgattttggaggtggaaagtcctgtatctgggtagatgttcttgatggtggaggcaaagagattttagaaaaatttgctgaattttttagcgattcttccatcaagaaggtgaacttttcttcttctatcccttctatgttcttaatcctattactctcctcaacatgcaacacttctcaaatattagttctatgcttgctactttatgaaatatgccttcctagttaagataaatgacaatcagctacaatctgttctgaaattaacctcaggtaatctaaaagtttagtgtcatattatacagagagctttatcgatttttactgtgtgttctgtggtatattcaatttttcaataatatgctaagaataggttgcaacttgcattcctaatgttaagttaatgtgtacctgatttaggatagttggtgcatggttttattgtatagaacagagaagttttcatcttatgatagaagtgaactagcatgatttgttattctattttattttatttgtgtagttgttagatattcttatcttgtagtaatagaaaattaaatctatcttttataaaatcatattggcattaaattcctgggtttgtctatgctcgtgaccagagattacaaaccatatttgaaataaccgagtcactggtgcattctgtaggtctggcataattatagctttgactgtcatgttatagagaattatggattcaaagtttcgggatttcatgctgatacaatgcacatggcacgattatgggattcttcaagacatttggatgggggttattctcttgaaggacttacaggtgacagaagggtcatgtctagggctcagctgaaccatgaaaaggacttgattggtaaggtgtcaatgaaaactatatttagtaagaaaaaattgaaaaaggatggatctgagggtaaaacaagtatcattgctcctgttgaagagctacagagagatgagcgtataccttggatatgttattctgccttagatgctagcagcactttgaagctgtatgagagcctaaagagccatctttcagacatgccctggaaatttgatggtgtgccagtttatgggaaaaccatgtatgatttctacaatgaatattggcgtccatttggtgagcttctagtcatgatggaatctgagggaatgctagttgaccgggcttatcttgaatgcatagaaaaggtggccaaagcagagcaagaggtagctgttaatagattccgcaaatgggccactaggtattgtcctgatgcccagtatatgaatgtgggaagtgattcgcagttgcgccagcttctttttggtggcattgtgaacaggtgcacatttttaaaatcttacgtgtagcatttatttcaatcttaaattaatgatttgctagtcaaagcctgaaatatttatgatattcataagtttaatgtattcactattcatgaatgatggtactactactggtacctaccttgatatttatgaacttttctgtttacaacaaagtagctgaaggatatagatggaagtaaaattttcatttcacttgtcacatgcttcattacagaaaggactccaatcagacgcttccaactgaacggatattcaaaattcccaatgttgataatgtgattgaagaaggtaagaaggctccaaaaaaatttcgtgatataaagttgacgagcctaggttataacctggagactgagatgtacacagcaactggttggccgtcagttagtggtgatgctttaaaggctctggctggaagtatttccgctgattatgacttttttgatgaggattgtaacttggatcttgatgatgaagatgaaaatccttctcaaagtcaagttgcaccggtaaaaattgataaatctgcatatggcacagcctatgcagcttttccaacagagaaagaagggagagaagcttgccatgcaattgctgctttatgtcaagtctgttcaatcaactctttgatctccaacttcatccttcccctgcaggtatttttttattgtttggtttgcaatatgaactttcttgagcttgcttggaatttcttttattttgaaactagtatacaaacttccatactgttcatattgtccgtaataaattgatgatatttttctattttttccctagaaaggatatttttagacaattataattattatataaacatcagtcaatgagatgcttgacaactcacctgtgcaccaaactcacaagtaccacagtaccttgagcttttaaaatactcattggagatggtcaatactaagttctcccactgcttagctatggctagggaaatcatttccttatctgagtttaagctaattttttgaatgcttattgtgccaccacttacattttagaacttttagtaaatatttgtattcttacactgaagctctttatatgtgctctataatagctgcagtttctctttgtcagggacataatatatcaggaaacgatcttcgtgttcattgttccttaaatatcaacacagagacaggacgcttgtcagcaagaaggccaaatctgcaggttattctaattagattaatcagaattctctaatggttttgattaggaattttcattttaatagtagttgttgtgaacttcaaatttttttaagtgctatacatttgagatctgaccattaaccttcatctgtgtgcttgtatgttcactaattggtgtcatacagtttccttgatgctaaactcttagtagatggctttatcattttgtcttttaacctaaaatgtagtttctccttttagtagggtttcttcctattagacatataagtccattttggacctccactctatctttttgctgctgtttttcttaattaaattttggcagtaaggttgaacaaaaaataaaattcagcagaaggtgaaataggtctgtggattatatgtgtttcaaacctgaattattcttgtgtgaggtagcgtgttaaaaatataaaaccctttttaggccgtcatctatcaaatatctcgaggtcaagagtcagttcttgacatctctgctcaaattacattcttttgtattcatttattacttcagttaaaaatatcttattaaaattagtgtttttggactaatcacagccttgctaattgcaatacacatttatgtaatcatttgatgtctacttggtcttgatgccttttctgttactttattacaatgatttggatcctaaatttggactgcacaatgcatctcattcattttcaatttgtattttgacattgacatgtgggtattacatctactagattaatcagaatttcaaaacaatatagaacctaacacatacacttcatgaattagaatcaacctgctctggaaaaggaccgatacaaaatccgtcaagcattcattgctgcacccaggaattctcttatagttgctgattatggacaggttaacagtctatattgtctatctaactgaactattttcaagaaatttcattctgttaactgccttgtttattgttacagctggaacttaggattctggcacaccttgcagactgtaagagcatgttggaagcttttgaagctggtggagatttccattcaaggactgcaatgaatatgtacccacatattcgtaaagcagttgagaaaaaggaagtgcttcttgagtggcatcctcagcctggtgaagataaacccccagttcctcttttgaaggtaactgtccgctgatagaagtaccatttcattgagatgtggaagtagtggctttgtctttagtttggtatttcttgtagctgatgacgtcaaatatagtgaccaccagagtgctggcagatgcatgagggaggactaatccttattctgattggaccgagatccatcaacggcaaatagaataaatataatttattaaaaatcagaacaaatacaaataacttgtgaactttccaatagaaataaaggacagctactgatcattagaacactgtttagggggaaaacatagttgcagtggtagtagaagaattcactgagttttttgatatataatgtgtttaatgatgtttatgtatattaatagaagtaaatcagaatacaccaggcattaataagcttttttagtagtttaacgttatttgatgcccttccctcaagatataaaaaagttgttttagcattttactgttataacttataaccatctaattcatgattgatcatgttttgatttttgttttccttccatgtcaggatgcctttacttctgaaagaagaaaagctaaaatgcttaacttctcaattgcatatgggaagactcctgtggggctttccaaggattggaaggtaccctgaacttttacttattatgagggatttacaaaggtgaaaagtgcccttgatttattatttgattgttcactctcaggtttctgtgaaagaagctaagaaaacagttgacctttggtacaatgatagaaaagaggttttgcaatggcaagaggagcgtaaaaaggaagctcgcgtgttacattgtgtttacacattgctagggagagctcgacggttccctttgatggcccaagctaacacctatcagaaaggtcacattgagcgagctgctattaatactccagtgcaggtccttagctctttctaataaacaaatcaatactgtgtctccctcactcatctatctaactgtctttgcacactctagtaaataaaaaatgtactgaattatttatcttgtgattcttgtctagtttggaacttttcccttttaagaacaatgaatgatgagatcacattttgagagcccacttgtaaaatatcatattccatagtttatattgaaatgatagtccagatagagctgtgaataagaatagagtttgattgtattaacattacaatagtgtcatcttgtattagtctagttagtactgttccctatcaggaatctccttttttgaaatccattattgggtgaaattatatttcctttacatatatttgatagagtgctaattctactctaccactactcctaagaaaacaccattaaagctacaaataaaagctataaagaagataaacataaaattcagatttcattcattgataataataagtaaagatgagtacatttatgtagtcctaaaaatgtcaatcaaggataataattatccaagtgtcaacatcatattattctaacacaaattaaaaaaaaaactataattataaaatacatatttaactccatcctatataatccttggaccatttaattttgggcctagagcccatcctatcattacccaccggttcacattcaaccttgtcctcaaggtttgaaaacaactggaattgagagcaacagcttgttgcaaatgatgagtatgttgcttttgggggcaagaaaataattgtggatgggttttggaaattggtggcagtacatgaaaaaagaaaaggcttatgagacttgttttgatccagtggttggaagggaaatataactttatgagaaagtgcactatgtgggataagggagacacgtggatggtgttgatggttgttaggattttgaaaaaatttggtaagtggagatggtttagggaggatgtacatggcatggttggggtgggattttaacggcttagatgtgtggtaattggatcgttggagatctaagggatggtgatgcaattgagagagtgggagccagctgtgatgtgggagtgcacatgggtgaaaggacacatggtgatctagatgttttattttctaatatgatggacgggtgtgattggggaaggaggttaggttcaattgcaatgagattgggatcggtgcggctgggaaatttcccaagcgcaaaacattggttgccttttggtggtgtattgtgattgtggatttggagtgaacggtgaaggggattgtgggtggtgggttggggttgcaaaaattgaaaaggttgatgtggggaaaatagattttgttgcaacacccagcaagtgggtaaggtgatacagagatgcggttggggttggggttggggaaaatgttcatgagtggaacggttgtatgggaaatattgttaaagcaagggtacggagaggagaaactttgttgtggtggaaacagtggcgactgttgcggcggtggttgcgacggcggcgacagtggcggcgattgcggcagtggttgtggtgtctgatgttgaagatgagagcagagagttgcttcatcatgctatgcacggtggaggtgaaagtgtcatgaaaggaatcctgggaccttagatgggtagtgtgctgagatattttattttcttcatagtggttgagttggttctggaaggcatctaatttcggaaaataccttaaaggttgtcttccatggtggttgtggtggatttgggagggggagtaagatgatgaaagcaccattggatagagtgctaattctactctaccactactcctaagaaaacaccattaaacctacaaataaaagctataaagaagaatcataaaattcagatttcattcattgatagtaagtaaagatgagtacatttatatagtccaaaaaatgtgtctttacctaacaacttatagcttttgggattggtttattacaatgcccatagaatttgtaatatattccattagtttgtaaatgtaaagataaatataaatatattattactgaaaatataagaaattatttactatttgattaaatatactgataatgtctaatttatctaaaattagcttttacaccatcattatttataactaattatgattcaattgttagattgacaaaaattacatttagtagaaactattcattgctgttcatgcatcatgctacctgtgaatggggagattgtgaatttgtaaataggcccttgtggagtggtaatggtatgagctaatcttaaccattggataatggcttcaggttacatgatttcctaaaataaatacattactttgtcattaaatccctatcctgctgtctgaaatgttgaagatttagtctgactcataatagcccaatgctttctgtggagatgctattaccatgtaacccattcccacatgcatacctttctttttgggtttctgatttgtagaattcaacagggtagtgcagctgatgttgccatgtgtgctatgttgcaaatttccaagaataaacggttgaaggagcttgggtggaagttacttcttcaggtaatttagtgccccctaaatttcctttttttgtaaaaaaaataattctttctcgcttttattgtagtgtgtctgcaaattacaccttatctcacttgccattattctagagtcttgaatcaacaagcaattctatccattcttcctccctaagttgggagggggattggaggaatataagcattaatacgcaaacaagagcttggctgactcatattctataagcttctatgtaatcaataatttatgcatctgtcttctcaaaacattttctatggatcattggagaaattaagtgatgcctatgtagtccatcctttttttcttcttcttttcctgttgattattaatgacattatcttggttgtagttcttgttatcaaccaatgtaattgcagttacattacaacttgttccattggtgaattattccaccacaagaagtagttcgttttgccaactttttgaggcaatttccttaatctaaaagcaattaaacgatattagtaaccatatagttacaatttctatcaaccattatttttaatcagtatgttctgatattgaggttatttcaaatctgaatgtgttcagatatctattccaatcttgctgctttttcactaagattcttggatatgtcaaagcaggttcatgatgaagtcatattggaaggaccaacagaatcagctgaggttgcgaagtccatagttgttgagtgcatgtccaaacccttcaacggcaagaacattcttaaagttgacctctctgttgatgccaagtgtgctcaaaactggtactctgggaaatagtggtagactggtagtcccttatacagcatgaaaagccatgacaactgtttggagattttttctcattcagatatctttggctgcatggttcctttggtaattgcaatcaaaagatactgctactctggtgcctctattttcaaggcagaattggtatgccttaaatatcattatctgaggttgatttctatagaggtttttgacatcctaggaaattttccagtgttatgttttgataatataccaaagcataacacgttttgctttgaaggaagaaaaaggccaaaaccactggcctcggcgttttacttctctagttagcagttttttttgtttgtttgttttttttttttttttttgttttttttgcttctatattttgaatgtataccggtttttcatgccttgcatcatgtaccggtttgttgttttctcacttttctgaagatgcaaactatatcaatattgtatataaattattataaaaagaatctatctgcatttctgttgatctgttgcaaacatatacttctttgtagaaacatcatgcaatgataattggacgctcaaatagcactttgcatgcacaaatgatcagtatagccagtgacaattaaggttgacaactttcagtaatatcaagcagaattatgaatttatgatattctgtacaaatgaatttatgaatcttatgaacgagcgcaaaaatggcatacaagaatggaccatggacctactttaaccgttatgcatgcctggcaggagctaattaccttattattctttgatgaaaagtttgtcatttgatcatcatatataaaatctatgtagtgcaaactacgtaattgtcctctatttttgtgaaagagtaaactttcacttcccattccagtattttttatttatttacattttacatatcgtaagtgggttctattattaaacataattcatttttatttttcacaaactttcactttttcttgagtttaaataaaaaaaattaataataaataccattgaattaagaaagttaatgctagttaaaggcattccagtttccacccactatttttatgttcatgattaaaattattttcttcgtactgaattatgaatatttttggtggggaaaactaattttggcacacctaccacaatgatgtgaatcaaatcaaagcagtggacgtgcactccataatgagacgaggaaagtgtgtcaaaatgctggttggatatgacgttcttgaagaccttatgacacattgtattaagtatatttattgcgagaggaattttgtggagagttcaaaagtaaatttcaactgcataattatatataaatgaaaagttttttaaagtcataattactgaaattatataatttaaaaaaaaaaactcacataatttatatgctttagttatttatgataaaatataagagttaatatattttttatataaaaagctttgtcacttcatacatttcctttatccaaaaatccaaatagaagtttcgttttcggttaatttcagtgcaaagtattgttttgggtctgtttccaagccgcaatttccaaacgtacggacttcggaaccatgcgcttgttgtatagggcatgtggtagggtttggaccttgaatggtgtggtgaatagaaaatgtaccatgtttggtttaataagtggaaagaaagaaagaaaaaatgattttttagttatttggtagaatataaagtgaaaagaaaggaaaataagttcatcttctctaatttaattgagtagaaaataagaaacaaagatatattataaaataatataaatacctttaaacggaaataaacctaataaaaaataataacataaatatgcttccaataatacaaaaaaaaactagtcaaggtacaagataaattaaacaataataataacctaaaaaaatcatcaacttaaataaaataaaacaaaactagcaatattttataattcaaggattttttttcttttaactcaaatttacacactcccattctttctaaattcgaaataatcaaattttggcatcaaattcaccaaaaccttaattttcttccttaattatgtacaaattaatcacaaaatactttctttctattctttttctttcttcattttttttcattattgacatccaatgattttttgcaaattattaaatgtaattactgacgaaagttgggtttagcataagcttctaatccctcacaatatgatgaaataatgtttgaattcttgttggaagaggtgcactatgaaattgtacattgaacaaattgtctctaaaagaggatatatgtgaaaaacaaaacaaaaacgtaattattaagttgttattacagtaataaaatccttttagtgatttagttgtaaagtaaattaaaataatgaatattattatagaaatcaattttcttaaaataaagaggagcaactcactctctagattcaacacattcttttttttattggccaaaatttatcgacaactacaaaattttgagtgaacttattaaataaagggtaagactcaaacaatttataatttccaataattttaattaataataaaaacgtgttagaaaaaatataaaaaagagaccgcgttaagaaaaagaataagggaaaatatgtaactagcaattaacattaataataataaaataaataaatttttatcataattaaaaattattctcgagagtcatagtgtggtatgttaaattctcttatttatttattatttgtgataaacttttattataatcttcaattatgaagagagaaaaaaacacaagtgtgttgaaatgtttattttgttttatgttaccattagaagaataataagttaccccattgaatattcttttaataaataatagttttataaaatgttctgataatttaaaaattactatcacgtaatttataaatttttattaaatctaaaattatgaacatgtgaataacattgtagtactacaatagagtggagcgtgtactttaggatgatggcaggtaagtaataagtcggatcctgtcgccttggccggtttgtgaccacgtgattcttgttttgcccaactgtgaactcatcagccccaatttctgactttttgcccttttctcttgggatctcaaagttaggttttagattatttttttagtaacagtttaattaataaagttataaattataatcaatctatatatcacaacttttagatggattctttttatataaaaattaaattgcatgatttgattttaacttataaaaaaacttaatttattttactttttaattttctttctcttatttcaaacatacaattttattacaattgtaatcagtaattgagtaattgaacataaatgaattattaatatgttcagattaaaattgaatcatagaactaagttcaatttttacagacaatttttatattagtccagtttccctttttcaataaaaagtgaagggttaagaaaaaaaaaatatgacatcattaattcatccatctacattactaacttattgtagcaaattattttagcagtttgtcttaaatcaagtaataaaagaaagatagtgctagagagtggcattccatttggaatttccacccagtattctatgttgatgattatgatttgatttctccataatgagtggtgaatatttggtgggaaagttaacttttccacgacgatgatgtttgtgagtcaaatcaacacagcattggatgcgcacgctacaaaataagacacagagcctgttcctcaaagttggttggattagatatgatatgatgatttttttctagaacagaggcagtttctcaaactcgttgcctccgaactttcaatttcactgaattttagctcaaaaagttagcaaaaaagttccctacctctgttgggtctgtttcaaatctgcaattttcatacgtgtggagccataagcttgctatgtgtacgatacccaactttgtttttcctttatttgatcttacctctctttgtggatctaaaatgttgcttctttcttctgcagtgttacttgttagaattagatttccacactttgaagtgaggcaatttgattgaatttgaagttaatgcctttttgttcaaacgaaatcattggttttctgtttgtgtatgtatgcttattttagtttgtcaaatttgatgattcttgcgtttgatttagcttgtcttttggtgaagctgtattccttttatccttctctggttctattaatgtgggtagtgttttagatttgattctgcttcatcccaaccattgtgatttggtagtgaatttttgctatgtgggttagttctttttctctccccttgtttccatgataaattattatagttgagttggcattctcatcctgaagtatcaagtgtggttgttgttgtctcatggcatacaaagagagagtacattgcactgtataaatacctgttttgttttgaaatcgtgatgcacagtctataatgtttttgaattatttcagaattgttgttctgctgttgttgatttgatgctggaactatgtttttgttagtgaatctagtaactctccaccccatccccctttctcttgaaaattatgacgcatatctctttatttctatagctaggctttgtgtgggtaaatttatctttaagtacttataggaaaaagaaataaaaaagtaaaatagatcgaacttttttcataaattaaaattaatttttgcactttaacttttatagaagctaatttctaggaaagttaaagtgtataaaatgattttattgtatgaaagaagttcaattcatttactttcatattttattttctataagtatttgtatagaaatttatccaaacatagtcttaatacatgaaagataaaccaaaccaaataatttgttagaaatttatgactttacatctcaaatcacagggtgacactaatttgtaagtgtaacagatcactgaataattctgctgggagcattcatctcaaagactggaacatttggatattgaattggaggtgttactaataggagcatggctcagagtctggaaggtataaaaggtggaggaggatccatcaagctaggcaccactggaacaatcagttccttaatgacaagggaattggttcacatctcttctgcatcaaagaagcaggtatcttcaacaagaagtaaaactcaaacacttcctgtttctgttccctgtggcagtacaacccaaaaaagactacaacaaagaaaatcatcagttgaagccggtagcagtggaagcagtaaaactacaaaccgtagaggacctggcaatggcatgccccagaaaacaaaaactaatgccagaaatacacagagagtacccatgctaggttctgataaatgttcagtggtcagaactccagtgagggagaaaaatgataaaaagatacctaacattgttgaaattgtggacataaaatgtgggaatgcagaaaaggcttgggctacacctttggcaagtcgtcttaagaagctcggtttttcgaagctatccgagagcattatctagacctgaaatttttttgtgccagacttcaggttcctgtaactgaaggctgaggtcccatttggcctaccactgtctgatacatccaccatagaacacatacttggtaaaagcttgctacttcctctctttttctttgtactttcttctactgtagatacaattgtggttgtagaacttgtactaatggatgaactcacctctgtgatttgggacttgttcctttgtgaattggaaccaattctgctgaagtactcaatttcttgcattatgagtgatgcaactgtgcctctggttcctatttctactgggggaaatttatccttatcttttgtgtcatttgagtcaagggtagtggatttatgcatgcttttgttggttggtgttggggagaaagcaaaatcttttgatttaagggtggtttgtgggtttgttctagaggggaaactgcagagactttgaggcatttcttttgttacaggagatgtggtttcacaagaatgcttcaccttatgttctatatctgaaactgaaatccatggcataggtctatgtagatagatgggagattggttgatgacatagtcactgcattcatgtgcttgcagttataacactctagtcctaactactgtgccacctttttaagtttcatcatgttcctaagtacatgctactagctaggtcgttatttgaaactctggatctgatgggattcatgtgaaaggtaaaagtaggacgatctcttccattggcttttttaagtaaattggtgttttagttggcaaggaatagtaggttaactaaatcaggaaagcaactatttatttgagtgcttttcaggttaagggaattgtggattattttggttggctccatctattttgtaattttgtttcatatggggttctgcaggagtgtgagaaagatgtaacattatttacgaatctatatctatcaatgagttaagttgctattttgaaataagccaaaaaccatgctattaggaaaaccaagatgcaggattcatgtatcttaatttgcatccacaaggtgtgagacaagtgactattagcttgaatcttttaaatacatgatagacatttaatttttgattatgagaaaaaacaagtattcgtgagtaaaggaattactctttaaatagtactctacttttttaaaagattagtcttatggcttttgattatgaaaacactctgaattaaattccgaatctaaaaaaattgttaatttgcaactatagtatttgtgttagctgaatcttcctttggtatatttaaatattatcttcgttatggaatccatttcttccctttattctacttatctgcataaatttattgccaccctactttactaccaaaaagagagagcaagtttgaggaacttgtgtcttactcttcaaaaactgccaatcctactggacccttgtcacgacctttgctttggtgtcactcacgggtagtccatttcacttcttggccatagatttcattccataaggtggaaaaacaaaatcgttataaccaaagctaaggagtgtctcattcacgaaaaggaccaggaccttactattttatccatatagtgtgcattttaagaatatactagttccttcaaaattatacctatctttttgttgaggagataaaaacaactataaataggtgaggccatcgggttctcaaatcggataatatgaaagttaaagccaagatgattaatcaagttcggtttaaattttaagtaatccgaacaaatttatttttgtttggttcaagtcattcaattactaatgtaattgtacaataataattattaagtgtgaaaagaatcaagaaaaaattctaatcatattcttttactcaattgaaacatcttaaatcaaaagcaataaaatcaataaaactttttttaagaaaaaaatcctctcgactttgcaaagtgttgtgcaacagaattctcctctttctaaatcttgtcataggccaagcataatgccttcatttacatcatcgtagtgatgaatgataatgcatataaccaaaataaaacttcttatgatcacaatattgtagaggaaatcaacattgaaacatattatggcagaagatgaggataaataaaaatgtagaaaaaaaattacatgatctagtcaatgtaatcaacgtctagaggcagttagaaagattctatttcttgtatagagaacaatataaaactcttaaaatgtgaacaacacctctatttttaccctgactcataacctaataaactggttcatattccaaaaaaaaaaaaaaaaacacaaaaatgagtttggtctacatcgtggaggctctgccctcctaccctctcatgaggctcatagtttcaaattttgagctccacacattgcgttacaacttgaattgtccccgttagcaaaatacatatcaacatttcttcaccttgacttcaaagggtctcaagctatttgcaatcattcaccaagtccaaattatacttgaacgtctcagtagacaaaggccttgacaacatatccattaattttcagcaatggctatctttccatggagaacaacttatctttaatatcatcttgagttactttcaacctaatatcaatatgttttgattattttttaaaatgatagattgatagataaaattcttggccaaattcaatgcacatttactatcacaataaagaatatggcttggaacatctacacccaagttatcaatatgaccctacaaccgtatacattctttaactccttatgttaaagacgtgtattctaccccgatggctgacaaagcaattgatcgtgagacatttatagcatttttttaactccttatgttaaagatttgtatcaaatagtattattgtaactttagatgactttttttaggacttaattatagacgactttatgtagacagtcttagtgattttattattaattgacacttgtaatcatacacgtcaatattcgctttccggggggacaatgaatacattaaaaagggaatgttaaaacttaaaaagaaccaattccaaggggtactcgaaattgctttagtaaacattaacaatgattatgtaggtttgttttacgttactcctctccggtcccaaataaccgattatgtggtttaagcaagtccgagagggaaaacaacatttctagttacaaatgctgatttattttggtctgtatattgtatatgttcataaaatgagttttatatatgcactccaaaatgggtacaacttgtaagatacttaacgtaaaagttataagtggtgttattagtacgaaaactggcaatatgaattcatataaattttaaagtgaaacaatctaagtgttgcataaaaattcaggtacgcaagagagtgaaaaccgtccccagttaacttgttccgcaacacagattaaaaccttagtcaaatgttaatccctccgtcccgtgtcttatttgaagaaaaaaaaattatctcaaaataaatgttatatttaacttttcaatataatattaattattttttttttcacaaatatcatccctaacaagtgtttttttattttttaatgtaatattaatcttaagattaattttgtaaaattattattttttatctatttaataacttttttgtatctgtataaaataaaacatagttactgcttaaaataaagctcaagaagcttcttcaaagtgtcaagcacacttgtgaaaggattaagcgcaataggggagttgagtcctagatcaggaaattggtttgtaagtgcctgctgcattccggacatagacatcatagctgccaactgactattggacattacttcacaatcctgaggtgtatctttaattttgcttggatcatatccatagtttgcaaggtaagacttgtacttctctataaattcaggtccagggttaggtgtccttgagtatatctgcgatatagatcacagggaaattaacactacaagcaaaatcaaatcatacacttacatcctaattaatagctattaattaaagaactgtatgatgcagtattgtttctttaatttatcttaataataaattagctttagatgtcatatatgccatcgttgaaaattcagaaaaagccttttgaagttcaataactacaaacttaagctatattttttagttcagtaaatacctgaataaaacttttatccttagctccggaaacaagagaaaaattgtcataatcagtagcaatcacatcataaggttccttgggaatgaatggcaatgtaggaaagcggagatagcatttttcttttatcatttcctgcttctctagctgtgtctcagttttctccaaatcttctgaaagacattgaacccttcccctaattccagttataaatccattagggcctccatgaacacaaaaggtatcaacttggatggatggtgcttccctatcaaacgtatatacaccctgaaatgtcatagtatgcccaaattagtatcaagaagcttgtcgaagccaaataaggtaaatgataaatcttatctccaagatgtactaactgttatactactgaatgacagaattatccacacatgcataataaataatgaacaaccttagggttctgtctgtgcctccaaattcaacaatttattatgaataatatgaagttgattagggaaagatgttgaaagagcataaatataatgggctttttctaaaccaaatgacgtcctctatatttactgctatatttattttagcatttacctgagtgcaatgacagtcttcttggccttgtcccgcaaatccacgtttaagtgaagcaacttcaaaccatcttcctgaatatcttacagggtcaaagtcctttgctgtcattcctctcatcatcattagatttgaacctttttcattctcaaatggtgaagtaactgcattctcactgggaccggcaagttggcatatattatttggtgcacgagatagatctgctgcaatagtctgttaatgaagtaaatgagtacacattagatcagctcattcatcataagaatatacatctattttctagatttttttatcaatcaacaatatccagcctttgtaagaactcaaatatgggaaaaattcaagagtgatacaaaatatctatgcgagtaaagtgatccacatcagaaagtaatggcatcagataatgcaaaataattaatatttaatagcaatggcttttgctttgggcaatgtccatgtaattatggagttataaaaaagattatgaaccactatagctaaagtctctatacactaccatcagcaaagttttaacaaacaacttgtgatcgcgatttcggccacagcatcaaggttttcagagtcactgcaactgaatcgcaatcgcaattgcaatttgcagccacatcagttgcatttgtctacaatttcccgcaacatcaaggatcgcgatgaaactacaatttaacaatttaaaactttgctatcatgtatttgggaaaaaaaatactgtgagaacgttaagtaggtcctcctgatgggtattggacatatcacatcttgaaattgcatgattaactgaaatttcaatagtaagtagtaacactcttggattgtggaatacagtacaaacctgatttgctggagaaataaatatcaaggaagcagcaagcccagataagacatgctttgtcagaaacttacttgggacttccaatgagaacttcaccaatgtccttcctgacactatcctgcattgtctgtaaacaaaatgccatccaatttgcacaacaacagaaagataaattacaaaaataaaaataaaaaatcatacgatcccaggttgagtgagtatcatgttttagcaacagagttgatatttaacagtatctacaaatgaagagacaaaaaaatgcacttagaatcccaatgaaagaggaggaccacaaagaaagaaaaaaaagaaaggagtctgcaatctaattcactaaaagttggttattacacgacaaaattctgggagtatataaaggaaattcattcaggaatgctgtgtatatgaatatggaaaagctacattacataaactgaaaattgaagtccaccaaaaataaaaggaaccgaaaattaaatgtaagaaaaaaacagaaaaaagagtctgcaacaaacgtgggaaaaaaaatcattgttaaaatacttggaattaggagaaaattctaaaggaaaaatctaaggggtgttccagaatggaaaaacaaataaagggacataaacacaagttgagcaacaaaattagaacattaaatattgctaaagatgaaaatggggacatattagttggatttgttacctcggataagaagaagggtgaggtggaggaggtgatgctcgtagaagaagctctaccatgtctttgccttttcacttgtccacagttgcccattctgaactttctattctgcttggtttcactttcatgacaaaaatcctcttgaaacatcgtcgtccaaggtcccatgaatcaaactgggcctgtttgaactggacattcaaggcccaatctatgtacaaccactttaactaactaactgtattattcggttgaaggcttaaagctaactaacagttgatcctaacacctttcttctgaccaccaaatatagatgagtgttagcgcaggatattatctaacacacttttttctcatacactattttatcgattaattaaaaactttctttaaataaaaagtgaaaccaaaacaatttggtgttttctataaagttcaactaataataaaaatttagctagaaagagtgtaataacaagataaaatgaattgaacttctatataatctaaaatcaacttatgcaccataaattttatagaaattaaatgaaaaaacaaacttctatacaattaagtgtaaaagttaattttaacttttgaaagaacttgaatttattttatcttattttcttctcttataaataaatttattcaaataaaatcttaatatttacacattagtaaatgtgtgtaaggagtgttgaacaattaacatttatttatttatttaaattagaaaagaagtcagaaagcatttgctcagctagttgaaatatgagaacaattttgttatttttcttaattcataacattaataatataaaaaaaaaaacgtaggtttatttgtgtcgtgtgtttgctcatgcttgtatgtacgctcggcttgtaggacattaggaatagtgattgaattctaatttaagagaagtgattttttttccaattaattcctgattgcgttgttcattttgggtttataaggaaataataggcaggaacctcaactcatgaaaccgttttctttattggtggtgacgagaccaaagccaaaaaaataaatagtgggagagttaatggctaacgccaaatttagagaaaacatgtgaacaaattgagaagttctgggaataatttgttagatttggtcattttaattaggttatagacaacctttaaaaaaaactgtgtcaaaatgaggttttgctttattctgttttccataaagttactctcatccatgaattcgatcaagtgtattattccatttccacattaatcttatttaattaacaaccaaatgtcactttcagtgagtttggtaaactattttagttatctaataactttatgaatttatttgactaaagtatacgtgtttgatcaagaaatttatctcattagcttataacgtttatttattttctacttaaaataacgtaatttgtagcgtataatttaacataatattttcatttttatcattaatattttaataaaatttctcatatatagcttccttgttactatattaattcaatttatttttatttttaatacaatatttgatctgtaaataaaaaataataagagttcaacttcaacctaaaaacatgtatatttaaaactttttataacttccaattgattcatcaagtatttttgttaaacataactaattatcaaattatattaaaaccctacttattaagatttttttctcaaagcttattgtggactaaaactaatggaagaaaaagtctcttttaagctcaaaaatccctttgaggacgatagtgtttcagatattgacactcaatcgagtttatttgccataaaaaaaattgagttttttcttcttctacgataattgtgaaacatacgtattacaagatataataaactattgagtaagtagaggagatccttgcaggattgtatacaggagattgtcattgtataagaaataaagtcttgacatgcacatgctagtttttaggtcactgtattttattcaaataattttaataataaatgtagaaacaaccaatattactatttcttttattatatccacgagtatatgtactatttaaaaaaacttaatttgaaaagaaaaacaattgttagaaaattaaataagttaaatttttatggttctatagttgattatttgagtgcttatattttaaaaaaaaaatcattctattaagtgtgtcttttgaggttcttctcaacaaatgaagtgtgcaagatttccaaattaaattgtataaagatgatatgcaaacccaccgaaagtatttcacgtacaatacacgcattattgaattttaggaagacaaaaaccccaacttttacaaaacccactttgaaactttaccaaacttccacgatcaaataacacaaaaatcaatttacaaaggaccccatcactcaattacaccgattacaggtcttgcaattaagcataattccaagtcgtgtgcatttcactttctttctgtttgtcaacacgtatgttcgtattctaggcatcaacatctaacgcaaacttgtaaacctaattctagttagttgatcctgagttcaatttagtaaacctaattatcaacgacagtgttcgtagttacgtgtaagttagcgaaattaattatacttatatagtaattagcagtggttacatatatatactaatgtcagtttggtgagaaccttttcgttcatttcattacattatcctaactccatgatctatgtaactaacaaaataaattcatattaaaatatataaaatatattaaagatagataggttggtgggtttatataattaatcaataaaactttagctagataccttgctctagagtctaaacttttatagatggaccacattcaaaaaagggtagcatccctaagtaaagtataaggtcagtcatggatatagctaggttcatttagggcaacatttggaattacaaatattccacaataaattaatagcaaataggttttagatatgaagtggtgttctctatcttgggtcatcgaccagcgtgccacatttttttaaaaatattgtctaaatgtcacgcgtacagtaaattttaccagactgtcacattgcctatttcgctatgcagtccagcgaaatatgtgagctgacgtgacgtaattctggtgaccacatattttgttacaggggccagcgaaatacatgatcaaaacgagcaggacacgtggcaaacatgaggtatttcgctgaagagcccaacgaattacgtgtcaatagaaaaaaaaaaatctcaaaacttcaaacggtcataacttttgatagaattgtccgataaaggcgtacgatttgtcaaaacacttaaaattcagagaggaaaccctaggcaaagtccctaaggagatttgctccactattttttcttcttccaaaaaaacgtctctaagtgcctcaaaattaggatttaagcgtacaatatatccttcaaatagtctaacttttaataaaaatatcggatcgagacgtatgatatgtcaaaacactcaaaattaagaaaaataattttaaaaataaaaatagaattaaattaactaattaaataattaaaaaagtaaaaaaataagaaattttttggatgattgaatcctaaatcctaattttgatgtgaactagcgatgaaataacaaaaaatctaacagcatatttggattagcgttaatatatactggatccatgtttatccaaagctgttacaagtagcttctgcgtcattttagtgtttatattaacgtgaaaatcttcctgtacgtggatctaaaaggcaccctaagccaacggaacttctctactttatttacaataaccccgataatttgttaggcatgccccattgctctgataatctattatttgtgctactatagtcgattatatgcacactaaaatttgttatgtatgcccccaataatgtattatgcgtagataatctattatgtcctgcaaattggatcctataactatctaatattcatatgtgagagtttagagtttatatacaatgatggaatagaatttttatatctaatctaattcctcttttcttcttctatccaaatcaaacagtttcataatatatttttttcttttacttttacttatcttggacctaattaagaatctaaaattttatctaatttcttatttattactcttatttctatttttttactatcctatttttatttactttacttcttttctcgctggtgtaagtaatgttatctacaaatctatagtataattttgagtaaatattacctgcaagtaataatattttaaaggagaatcatgcatggccaattgggagacccatatacatatagtatgtccacatctgatgtgtagttggttatttaatttgaattttataatgtatattttaaatttgaatcatacattttggtgtcagggaaaagataggaagattgcagggttgcagcagcctttttctttatcaaatgtagttttcacttttttgctctcagtgtgatcagtagattcagatccaccaatcagagcagcaatctgtaatttgtctaatcataccaacaaattgatggtatactgtacccacttccactaataataacacaaacccaaatataattagcggttctgtggctcccttaaattcctaatgtgaaaattagttaaatactataaatctagtagaatctaatcatggtctattcttcactttttaaattagtctgaaatcaacttaatcaaatgtaaacattttattttctttctttttaattaattttactattatcatttgtaattgactttagcaaaactaattcaaaagcgcgtttaacttcacatacattagacgtgtctaacatgctaaataaaattttttgtgttattaacatgctaaataacaaacgtttgcttcttttggtaaatattttattaaatactagacgtgtttaacatgttaaatattaaatgtttagtttttttagtagatattttgttaaatattagacgcgtttaagtttactactattattaaataacagtatatattttcataatttcatgctaaaatgtattaaactttaaaatataaaatatataatattttaataaaaaattctgcactctttcaaattggtttttaatttataattttttggtacattgttaattttataatcttaatatcaaatcaaatacttataatattgtttattttaataataatacattgtactaatggggtggaatattctttatattcaacaaatatatttagcttataaaatatttaattcaaattaaagatataattatgttttatattttttttctttcaaaaaggataaatatgattagaatattaagtatgaacctctgatatttagaaactcttaaacagtgcagtcgtatttttattatttttttattttgagaagaacgtgaccattcactaacggttcaatcctttaatacatgtaatcattctcatcatgtcttcaattcaatttcaaactaatactagaatgctaataataatcagcaagaaatatcaaaataaaataatttccaactctttcagtcatgaatgttattatttaaagcacgggaattaaacaagaaattacgctacgtggtcacatcatgcgccctctccacagcagataactcctcatcacactcggtttttcaattcctatcctatatatcctcataagatgccgaatgcatcatgacaattgagaaagatacatatacttctctcataccacaccccataacactcttgttcgatttcttatacaagaaataaaatgataagagaagggataagtttgagataaaataacacaaatattcttgaacagccatgaacctttttgacatctaagagtggaagaaagaaaacagaaaaaaaaaaagatataataaaaaatatgatgtgataaaaaaataaaaaaataatgagtgctattttttcttacttttataaaaatatatttgtataaataatactacaactacaggttaaaggtgtgcaagaaaacactcagactgaatcgatcgagttgtaatcgaaccaattttcacctaaattatttttttttaaaaaagaactatattattgtactaaagaggttcggttaacctaattgttaataaaccaattttcatccaattaaatcagtttttttctttttataaaaataaaacagtcctaaaactcgttcaaaattagttcaattcttaaaattgatttaaaactgattcaaaatcaattcaatttacaattaatttttaaaattaattcaattttcgaaccaattatttataataatttgactatttggacttttgaatcggttaaaacagtttagaataaatttggttcgatttttttttttttttttgtaaggaataggtttttgcacaccccctactacaggttcatttaccatattacccatctctacgcagaaaccaagaaggcggcaatacggagagtttaggaaaccgaaatgaaaaataccggtcaactgtcccctatattaaacagtgggaccgagaaaccagactaatagaccaaacgcaccgcaacaagaagaacaacaaagaagaagattaggtactaactatctatctgttatgtgaatattcaccgagaagaaaccatgctcgatggcgaagaagatcattcacgacaccactaggaagatgtctcagctgtgccggaaaatcgttcaggtcgaagtccggtggggtgtcctcagaagggtatctttcgttggccactttttccgtttcatttggaacagacttcttgtttgctctgtcgccggaaggccatctcactaccggaaactagccctccgggacccctcttcttcgccgctggccaccgttgacgacgtcttctcctccgttgcaaccactactggcgactatgactccgattccgatttggtgaacctcaagatcagcttgttgggtgattgccatattggaaaaactacttttgtggtcagcatgtttctaactttaccatttcttttttgttttggtttttggaagaatttaacaagtgtgtactagaaatttaaaaacttttacatcattatcaacatggtatgacataattaacaaataaacaggaatcttaagcttgtattcaggcttcaatttcaggtctatgcatataagagactgtttttgtctccaaagattagtagataactctcaaccagaatactctcagcactcaatttttttatgtaatattaaaaaattacttttataaaattcttaagcttgtttatcatgagaattaacaaatttactatatatgagaaagtttgtgattagattctccctacatatattatttatttcttttgaaattggtcaagtgtagtagtcttttattttaacgggtctaattaactagcttgtggttatgtgaattcctattctcagatcaagtatgtggggaatgagcaagaaaagagaagcttacagatggaaggattgaatctaatggacaaaactttgtctgttcaaggagctcgtatttcgtttagaatatgggatgttgcaggttctttgcttaaactttacctttctttccctttatttttctctgttttgtctgtgtatactttttagttttcattctttttagtgttctgggtttgttggtttgagttaattgacttattgacggtgactttatattatgtggcgtgtgtaggagataaaaggtccttggatcaaattcccatggcttgtaaagatgcggttgcgattttgattatgttcgatctcaccagtcgttgtacactaaataggtaggctaagagatactattatctgtgtcatgagttaggtgaagggttcttacttcttagaaacgtaatggtagaaataatgatgatttgcgttttttgtactttgttatgttcgtgcagtgttgttcgatggtatagtgaagcaagacagtggaataaggtaccgtaaaaaataattttgcagggcttatatatagtactattacatgaattgattttatttcagaaagtgtctgccactgtttaaattaaagtgtagtttccaaaggcttttggcatggaaactctttttgtaaaacacgagagaaattttgaagtagcagtgcaaatggtttgagtatccacaggaaagtgacattaatttttttcattaagactggacagagaaatgaactctgattattgacttgccggggtatactattttttcaagatatcaaaatggcttgttaatataactaaatattctgttttaggctgataatatccaaattttgaagattttgacgtattttttatgaaatttctgatgacatttaatctgttcaatttgcagactgcaattccaattctaataggaaccaagtttgacgattttgttagacttcccccagatgtgcaatggacaattgtaacagaggtaaatcaatgaaataataacaattactgctgcaaattaggttttggtaacttaatttctcttaatcatagtacatatatggatgggggctgctttacttgccttggtcattttcacctattgactcgggaacaaagaataattcttctagtaataaataggagtcttatttggaacctcagcatgtgtcatttatgaaagttccatgtttccgcgtttaacattaactttggggcttacatgttgattaaagtcggatcagtgatgtgttcacagttcactactttcactttaaataaagttaatactacaactttttatcacattccttggtttttcaatgtttaacctggtacgtcacataaatacaggcaaggggatatgcaagggcgatgaaggcaacccttttcttttcaagtgcaacccacaacataaacgtcaacaaaattttcaagtttatcatggccaagctctttaacttaccatggacagtggaacgaaatttgaaacttggagaacccataattgacttctaaattgttctttacacactgattcgtatgtatatagcaggacaaaggagaataaaaaatagaatgagaaagaaagaaaacaagtcaactttttcatatatattggctgggacctatcaccattcaccacctagatacctaatttacatgtctcaatatataggccattttgactatacgtctttaggcttacccctgttgtggctgaggtcaaagcccacaggtcttgataattttatttctacgtgccctgataaaggagaaattctatttccatataacttttgtatgatattttttttattcatttaatgttactctctaacacattttcttttataattgttcaatatttctaagaaattatagtattacgagtgagaataactgaataaagagtaaaacctagatgaatgtgtaatgtgttgtttatatttgtcttgattttgaagtgatgtaatatctttgaatgtgatttatagtgatgcaattatgttgaatgtttttattgtaaaagcatatatatatatatatatatatatatatataaattttcctttttttttttgtcgttatatgaatcacttaaatttataatagtcgttaaatttaactaaatttaatgttcctgaattcatttaaggaaaagttaagttattgacattaatattatttttatatataattttaatattggatagtaatattttatttatgatataattttattttaaattaataattaaggatagaaattaaataataagttatatgtgattatattcaatctttttttttcaaatcttaaatactataataataataatttgattattattgttattaaaattaaaataatagtctatattaatatatatatatatatatatataacttcaattgaaatattaagaaccataatattaatattttgatttcataataatcgttaatctaatttaattatgtaaccttcattttaatatatttttacataaaaaacaaagcaatagtatcatgtcaactaaaagtagtttcatataatattcttagtttatattttaaaattttgatatttatctaatacatataaatttgacttgttaaaaagttcaaattttatttatttaatttttagaaagatatttattttcatcaaatgcaacagcatgtcatttaaaagaaattttaaatatcattttaatttacattttttttacattatgtaaaaaatataaatatattatatatttttaagaacttcattttttatttattttatatttattttcatctttaaaaagagaaagaaatgcgcaaagtaatatatattaattaaaggaacatttagttagccttcctcccgtgttcaataggaacccaatacacaattcctaagaaaagaaaacaagtactatgtcatataaagctgatgtaaattgcgtatttttaagtaaccaccaaattcaataccctcatgtaattaaacttacgaaatctaaaaaatgaatacacagcttgatgaaatcagtgaaataaagtcttagcagcaaagagatgttataacatcatatcgactttgttgtcgagtttatacactaacatttaatgtagcacccagtcacacattcacaatactctcaaattaaaatattattactaatttattaacagattgatatctccaagtttcttgaagcccttggaactgtcaacaaaaattctgcatctttacggaatcgaggttccatggtcctaccagaatcatctttcaacatgtttatactaacccttttcaacatatccccattaccgatgaaatacatgagcacaaaaagttcattctcagttccacagaacccattaatctccaccacttccagacttgaactcaagcttgcataaactcccacgttgtccctccagaatcgcgtgcggttaaacagaaacggtgtttcataatcctaagtacattatatgtaacaaaaaattagcagctttttttatttttcaaatgaaaaaaccacacatataggcaaagcaaattttaaaaccacacatataggcaaagcaaattcaaaaacctaatatatataaaggataaacaaattcaatgtatgtgattgatactcacaaacaaatttttttcggaacatagatcaatggtgagacactctaacatcgggcaactgttgaggaagaatgtgattcccaaaaactcgttcttgtccaaagccgtcttcaagatcaaatgttgcacaagcatgtcacttcgaaaacctagcagttcgggtccggtaggaataatcttatcgcatcacacacaaaaaaacgttaattgaaaccatcaacaaatcattttgtaattagatatttcaattcagtgaaaaagaaatggaacaaattgatcaaaagagtggaactctgaaagttataattataaaagtagaatatatgataacgtacaattaagaaattaatatcaatagagaaaaggtgatgaagaatgtatacctgaagaacaaaactgcatacagtcaaaactctaacaatagatagattttccaccagattataaagaggatgaccaaatccttcgaagccatattcttgagagaaatcaatatttgcctcttccattgagtgtgaatgaatttccgtgatgaaaaagttcattaacccacagtactggaaaatttttagatctggtgcgttcacttggaaaacatcaaattcaaagcggcacttgtccaggacaagctttctaagacccttatgttgttcgtcgcctaggtcaaacttgtctgagttccaacaacttttaaaactcaaactctccagcatgttacaattggaaagcaaagctttgctagcactgagtctcacttccatccaacccaaagaaacttctttgagtgcatgaaagttaagcacttcagtctcaacaaaactacaagaatatagcttcaaagactcaaggctaccatgctggtaaactcgtgctggcaattgaaactgcgcctcgtcataattaccataataattttcattccagttcggatcagcaaagtcaagttccaactccttcaccccacgttctgtggcaaaaacagcgcattgatcaatgatctcaccagcatttctaggatttcataacctaaaagagaacttctccaccaaagttcctttgtgattttcaatccacaaattaatgaagtcaagaaaagtccttctttggatttctcttgtttcattaggttgatcaggtttaacaaaaaagagttcatcaaactctatgttttttgtgaacttgcaaacgttcaactccaaccatttcttcgagaggatagaagttctcacagcttccttgaagggaagaagtgaaacgatagttataagcaattccattggcaacgaatagatgctcattgccatggttctagctatatgatatggtgattgataataaagatgtggataagactattagggtactgaatttttcttcaaatattccaatgggattgaaatgtgtgtgtgaaatggccaatgagtgctaccttatatatgcaacagacgttgcttcagtgagaaaacaatgttgcatacttctatatggatttttgtattttttttttcttttctgtaaattccatgtatacgttgccgttattagaattttttttaggaaaacataaatatatatattaattaattactataatatattactgttggatttagaatgaaggcaacctttggtgaaaatgcataaaattttaatgggattgttttcttcatttgtgtttttcttttttgtagattgtatatatccattaattaatttcctcaagtcccacaatggtttccattgttttttttacggtcaatggtttccatggttagcaataaattttaagaaatatttgcaatcaattactttacatttgttatttgtatttcaaatatttttaatgaattcaacctacgtttacagtttttatatgttgcataaagtaaatgatcagtttttatataaattttgtgtgtgtattaattgaagaaagagagaatgtgagggcaaataaaagaagaaagagaaacaaataaatgtgaactagtgtaggatcattaatattttaagattaattaattagttgtacatgtattaattattttaagagtctaatttttaaatattaattgtttgtgtaaaaattctcatccaaataaaaattactctattcatttcaaaataaatctcagtctgtttttttattcttacacagacaaagaaagttaataaatagataaaaaaagagtagtaatttttttataaaaaaaaaatgttaatgagtatcctaagattaagaaagtaaaagaggataatatatattattggaaacagtgaaaaaagtgttttcctatgatatttaaatgcactccgcatgattttcaatataaattttcctatttttgatttcttaattagtgttcttagaatcacaaaattcattttataaaactaaacttattattaatgttatattgaaaagctaaattaaacttattaggagtattattgaaaaaaagtaattgatattaaattggaaagttaacataacactgattttaggataatatttatttttaaatataacacttattttgggatggaagaagttcaataaaattatttttggtctaagaattatttgatttaaaatttattttaatgttaaaacttaaaataagaatttcaaaaataaagaaaaaattgttggcttaatatgttttccatatgtgtaatattttccatttgtatttcactatctaaccttttttttttattacctgaaatattttatgtttgactttagtatcatttgtcagtcagactttgttaatattaaatataatattaattaaaaaattaatgctaattataaaagataaaatatttaaaaacttctatattatttttcaataatactatttttatatggtaaaaataataaacttaataatttttatattatttggaaagtaatttaataaatatatatttagaactttgaaacttaaacataaataaaaaaatttaaagataatttacaaatagtatattatatataatattaattaaaaaatcagtattagttataaaagataaaatatttaaaaacttctatattattttttaataatactatttttatatggtaaaataatgtatttaaatcaaatttaagaatttaatatcatttgaaaaataatttaacatatataccattttaatttagaattttgaaacttaaccacaaattaaaatcttaagaaatattttggaatgtaaattaaatcaataacttctatatgactgatatgacataattacacttttaatcacttataattatgatacataaaatactagaaatataattaagacatgtcaatttgttttttaaataacatgttaaatgtcacttcatcgacatgtgcttatttagtgtcacataagaaaaatttattaaatattttaaaaaaagtatgaaaaaaagactaaaaatgcataattaattgtgacatttaaaagattcaattcacgcaactgtgccttcagagtccaaaatcactaaatcatgatatatctaatgtatcaaaaataaaattaagcctaaaaatgtctaagacttgatatatatatatatatatatatatatatatatattataattagtagcatactagttataaagtttttactataatttaaatttaaaaaaagtaagccatagatgagaagtaccacttgctccctgacttaccccaagttaaaaacactttgcaaattctaccaagttagtatatcaattttgttttagattacactatctcaataaaaagaaaaaaaaattattatttctcttgccataaaagcaacaaacttggattctgtcttcatgattctttgtccttttgataaaatactacataacataaatctgcatagcttttagattgtatctgtcaatatccacgcttgatatatattgatattagaatgcacataaatactaaattttagccttaaaagaatgaaaaatcttaagctgaaacacaattaaaagctattattgtaaaatgaattttttaaataacatatatatatatatatatatatatatatatgcatctaatgaaatctgtgaaatctaaataaaatgcgtttatataatatagacaaatgtcttgtattaataagtaacgtttgcaaactaaaaatgcataacaacaaagaccaggattagcacttaaacatataacatggtaagttgtttttttttttttgaataaaaagttgaaggttctataaaataatattaaagatagagtactttttcaagacattcaaacactttcttcaaaatgtaaattacatccgcaacccctagttttgcttaaatttcatcttatactctttcctttttgcacctacaaaaaatcttttaattgtttagctcacattacacccagaccccctccatcctaaacaccgtttaataatttaacagaaaataggcacatgctggtcatatgacttttaatgaaattttatgtttaaaataccctcatcttcttcctctcaacctgaaaatattttaagactcttatttttttctctaattaaatgtgaatccatctttttgttaaacgtgaatccaccttcttgatacgcagtattaaccctcttccttcttcttcttcaattttttagttcagtttttttctctgattgaatataatcatttgcttcaaatttagtattttgttcctacatttgtgttcttatggaaccaaacatcaacactattttaatcaataataataaacaaatgattttcagttcatcccaaatatcaatactattttagtcaataatgataaacaaatgattttaaatatcataagtggtcccaaactgatcctctatttaaaccccattcagaaatagacaacaataaacaatcaaaattaaataaatattcttaaaaagaatctatatacaaggttcaatagtcacttacaagcagaattctagtgtgaacagaaatcgtggaacataaagagaaacagaggaacagtggagaactcgcgtactggaagagaaacgatgaagaactcatgaatggtgaagaggaatagaacgtgaacttcatgagaggaagaggaactcgcaccctgtggacattaaagaaaactcgccaacaagaggaagatgaatattacttgtgaataaggaaaatgaattaaaggtaaaccctaaattttgaaactaattgggaggggataattttaattttacaattaaaatataaggataatttcgtctgctcacatattttaattgatgttagttaactgcgttaacagaaggaggtaaaagtaatatgaaaaaagagagaggtatcaggtgaaatttgagtaaaatacaagggatacgagtgtaatttccttaactatgtgttaaaagattgatatctctgagtttctgccatttgacggcaatgagactccacagtcttaccggaatcatccttcaacatgtttatgctactctttttcaagacaaatccacgaaagatcaaatacttgagcaagaggtgttcatttagagttcctctaaagccattaatttccaccacttctcgacttgaactcaatcattcacaaacatccaaatattcaatccagaattgtgtgctgttaaaataaaacggtggttcataatcctacaatatacaacagaaattagactccttttttgttaatagaaaataaccacaacatatattgatgtgttaaaagcaaattcaaaacttaacacacacacacatatatatgtatataggaaaaacaaattggatttacgtaattgatactcacaaacaactcattatgttgcaaggccatcttcatgatcacatgtacatccatgtcaggttccatacgttcgggaccagtaggaatcaccttaaaatatcacacacaatacgttaattaaaacaatttagataagatagatattgtaattaatccatatttcagttcatccaaacagaaatggagcacgtcaaaagagtgaaagttatcatggactataagcgtaactatacacttatacataattataaaactagtactaatatatgataacaattgacaaattaattatgagggaggaaaaggtgatgatcatgaagaatttagcacaaaactacttacagtcaaaactttagcagtacaaacatcttccacgaaactgtagataggataaccaaatccttcaaatgaatattctagagagaaatcaagatctatctcttccattgcgagtgaatcaatttctatgagctaggtcaaagttcatccacccgcaatacttgaaaattttgagatttgtttcagtaattgactttgaaataatcaaaatcaaagccgcattagtccaggacgagctttgtcagatccatgtgtttttctttacctaggtcaaacttgtctgaattccaacaccttttaaaactcaaactctccagcatgttacaattggaaagcaaagccttgatagcactgagtctcacttccatccaacccaaagaaatttgtttgagcacgagaattaaacactttagtctcaataaaactacatgaatatatatagcttcaaagactcaaggcttaaatgagtgtatcttatgtattttcctatcaaacatgtagtaaatacaagtgatttgacaaaatgaagaaacacccatgcctagaaatagcatataggaaaatattcaatttacacactttctttttcatacatctctttttcattttagttttatctctatttttcatcacatctatcactttatctctcttttttctttatttctctttcttccttccacctcatgccatctcttttttgggtttacatttatcaggttcacagcatacataagagtgattctttcaaatggaacttgttagttgtagtgaccatatagacatggacgctcaaacttttatgctactatctagattcaacgataagtaaatctaaacttaagtgtggtgatccaaaatataaacaaattaatcttaattaatttcactctatttaatggtattctttctaaaatattctttaattaatttagattttatttttaacaaccttatattattgcgatatgaatcgtatgactttcaaaatagagaaagtattatcattcgaaacaagttctcctaaaattgaagtatttcatcagtaagcatgaaaggtagtttaggaaatgaagttcattttttaaatgagattagtctcatattactaatctattatttgtcagtggcatatttctcactcaaaatttcataagctcctgatacaactttcactgagtctatgttagctcaatttgagacacagcaaaaaccaaagctacatacaagaatcacccaccccaaagtaatgattctcataaattgtctgatggtgtgaggtgaggtgagcaatcttcaagccattaaaaatattataaatacattagattatgtttcttcattaattctcaaaaaattgaccgaaatccaattattattagatggcctagagagagattgacagtgcatgaattaagtagtgcagaagtaagaattataaagttgatttggtggttgaaggaaaaaagatgttgtaagttcgaattcgctcactaacaaaaactaacgaataacatttatcgataaaaaaaaaaataggacagaagtataatcacggagcaacacggacacggggcagttaactgggcctccatctgctaatcaaaggttaatttaaagcaagaatgacccaaaaatataaattaaagctccagccagcatcttcactagtgttagcaagcattaatgggaatcataacgaccattataaacaagatcaccgtactttgattattattaagaaaaccttattataatatgccatgcatgtcttgagaaattatcctcagaccaaacaaatacagatgtttattcctcaaacttaatgataattcagaaatagaggggggcaaaaaactaataatctctaataataatgttccacagctgtgtcatcattattaattattatgtacaattaggcagacagccggatcaaccagtctttaccataatccagctaccacattccaaaactaacttccttatcggtgaccttgtatgaccacatgtaaagaagttcggggataattctcaattcctcaaccctactgatttgcctgcaaaaaatgagtagaatgagagattgtgtatacctgcaactaaaattgttgttttcaaaagaaaaccacattataagcaatccacatagtcagtactctgtttcttactttcttaccaccaatctttttcttgatatttcaaggccctccacaacaaactatatttaaaaagatactaaacatgtgaacaaatggattggtgcagtcaacttttgaagctttgatatgctaattcgtaataacatagatttagaaaaggaataaaaactatggtgggttcaaaccaatagcagttaggtcataggcggcaattcaaagtgaagctacttaataaaaatcagatcacctaatttagaatagctccatcactcaattctaacctatgactataaatctcaaatttttccttctagtgtacttacaaaatcaaattgttccaccaaatatcttttgaagtataattccaagacagtttgcacactagtattagacagtgtaggttcctccacctaatcacccaatgtctaacaacacaatctatgtcacccctgaagctagcctccaaaaccaacctaatacaacctttgaaaaggatcctccaaggctccaaccaataagaggtaagagtatgagcatgtatatggttcatttagtgcatgatatggccaaggggcacaatagttaacaataaaatatcactatagaaaattctcatctagataatacctgtgaatacaagaaggttccgaagatggcaatagcagctcctagagcattaataggctgaactggtgtgtggaagataatgattgaagaaactataacagatatacgtttcatggtgtttccaatgctaaatgtcaagggagagatctcatccagagacatgtatgacacttgattgtacagatgataaaatatgctctgagctgccacccacctgttgtgcacaagtagcagccatatgtttaatcataagacaaaacaatgcagaagattttcagaaccacaagtgaaaggacaagaatattagataactcaaaatcaaaaacaaaagaactcaggtcaatttcccgtttgaaaatccaaacacataaatcaggtttcacaccagcttcacggtcagcagcatatgtgtatgtgaaggtgagaactcttaatttttgtgagaaatgaaaacattggattacaactgttagattgaaataaactgttaattgcatatttaatttccaatctcacatgatctttgattaaaaaggaaaaaatcacgtgaggtttacaattaaataaacaatttgaactgaaaatttaaaatcaaatttttataatgaaatgtttgcatttctcaaaataaccaagaacaattaagatttaaaacaaaaatcatgcaactttttagtcatgctacttttatgtagcttttaatgttgatcatctatgactagttatacgaaaaaagatttgctctaatttctaataactacaaagcaactccataaacaatccaaccacttccaccttaccttctcctgctctgagatagtgtacacattacaaaaacaaatgaactaataatttgcgcaacatccaataaatttgaatttctgaaaaggacacaagatgccgacaataattgtcggaaaaaaaatattatgaatttatgacaatttcaagatatcacctttacagaaacatagcatagataacatcagatagagtagacattttgtaattaccatattatttggggtccaatttgagagagtgctgtttgccatccagctgcccacatctgtggtccctccacagcaatcgcaaatggtgtgagaattacaagggacaacatagataaacaaccatagtaattcattccactaatatcctttcccttcatgccctttttcgaatagatattacggagtacaaatgccaaatttgatatcatagcccccataaaacctgaaaaatataataaaacagtaatgaaatcaaaaccaggagggtgtgaaggactcctatgcagaaaagatgaaaagttatgtacattccatcataacctctgctaatggcataaacacccaagaatcttatataatagtaaatcatccattccgttggtggctcaacacaagcatgaacacataataattaaaatatatacatagaattccagtaataatcactttgcttgtggaggaagaaggggaagggtattgtgacattgccttaatcaataacttgccatcaaattatcttctctcgggtcaaattttttagttcaactcagattatcttctcatatccaacttttatactatgttcaacaacaaaatacaaaatagaacaaaattagataacaaatcatttttttgttagaaaagcaacttctttaccaatcatattgaaattgagctcagtcacagctgcaagagcacatccaccgatgattggaatcaaagacaggtagactggcgctgggaattcctcgcccattagtctggaaaccattacactgaaagcaggctcagcactcttaataatatgggtgaatgatacggcaacttttgacatgctaacagttgccgctacatgtcctattgtatgtaaaacagcaacctgcgggggaaaacagcaaacactaaggtcccaatccatatcaagatgttaataaacaaataaataaatagggggaaaagccaaaacgattcaagttcttaattaaattgcggtcacagacgcggtctaggtttcatcaggatctttgatattgcggcgaattgcagccacaaaggccacaaaagccttgacattgcggccaaaatcactgtcacaaacaattttctaaaacctttccaaaacttaaatttccatcgttaaaaaaaaaatctctctggtaaacctcctcccattcatcaacatagtttaaatgaattaacttttctctttctctttttcatgaaatcgtcaagcttccctgaagtcaaaccacacacacacacacacacacacacacagagatatatatatcaaaacatgggacaaaatagttcttaaaaaaaatgttttccccagaacaagtacacgtaaattataacaaatgaacaaacaaaaaagtatgctttcattttctcccatcaaatttatcctgaggaaacaaacaaaagtgagtcacttacagggaacaaattcttccagaactgaagatcagtcttaggaggctcaactatcttggtggcccaacagaacaacattatgagagagccacatgcaagggagagagttgaggtaagccaagggtatgggaatgcattcagcaccttcttgttataaatgttgaacaccacattcagtgcccaccatgttgcaaagtatatcccaatcttcaccttcttagcagcctctgatggagccccagcccctccaacctctgatctatcagcctcataagcctcacatgtcacgaaatcagcacgctcacgcctcaccagagacccaacgaaatctccaaaaccaacacgagaaaggtgcagtggcttttgcactgacaccaatgatctcagagagtttttttcccttgaagaaggtgaaacaagggaacatgactgaactggggttgaagctgaacactttttacgcaggaaaagatcagaacctctgatggatatggcgggttgtttcacggtgcaaatcatggtgtgcgatcacactgatgaaacgatgaaaaatatatttaaaaactaacaataaaaatctaaactttctgacgagaaccttaatgggttgctaaacaattgatgggagaataaaaaaacgagagaagaaagtagggatcccgtgcgaatgtgtcagtgtcagagccgtgatacgaactctcacggactgagcactattttttttatgtgatttgagaatgttgctgtgatgatttggctcaatgtgaatgtgatgcccctctgagatcctcagatgtttagtttagtgcaaatcgaagttactgcggcagaatccgataaacttactaggttgttaccttaatttagaaaagatcaagcataaaaatagaaaagatatggtaaactttttaaggatcgatgactaggaatctgttttgggagatgctgagacgaagggatatattgaatcaggatttttaaatatttttaaatagtataaataaacattttagattgaatcaggatttttaaatattttaaagtattataaataaactttttagattgaatcaggatttttaaatatttttaaataatataaataaactttttagaattcaattaagatggttaagatttttaaaaaaataataaattttagtgttaattaattatgattttttataatttataaaaagttttttgttaaaaaatacatataaattttgatagattatattttaagattttgacagatattatcataatttttaggataaaatatctatcaaaattttgatagattattttttaaaatttggatgaattttattgtactttttagtataaaatatttatcaaataatttcatccaaatttttaaaatttgatagattattttttaaaatttggatgaattttattgtactttttagtataaaatatttatcaaataatttcatccaaatttttaaaatttgataaattattttttaaaatttggatgaattttattgtactttttagtataaaatatttatcaaataatttcatccaaatttttaaaattctattggacttttttcttatttttttattgattaacatattttcttttctctcatcacacgtatttttttctctttttaatatttttaaagatgtgtgtatcatatgtttctcctattcttttgaaataaaaaaaatgttaattatatttttttttctctgcattttttcctttgttttctaattaaattaccatattatattcatcacttgttcaactcaatatttttgtgactgtcatctttaatttcatcatccacatacttagtaactctcttaccaatttttcactctaactactctcttatagtatatttttattattgcatcccatttaaatatatcattaaatttatcataaaataattttaatatttttaaaataataaaaaaccaaagtataattttaaatctacttttaaattcaaaagtgaaaataagaagatgttaatataagaagacataaaactaaaatcaatatagttattaaaaaattaaaaaatatattaattttacttttttatccaaacctcattatttcttattattttttcactaaactcttatgaatgtatttttaaaattttatagaatccttttaaatctaataaatctataaagttttttaaaaaaataaattcttatgatataaatctattaaaattcaaattatcataaaagtcttataaaaaaatctgataactcataatattcatatataatctttaaattttataaagatttttttatactaaaataatctcttaaaaatttaatccaataaaacccgaaatccactatcctataataaaaaaacatcttcttgcacacgtgtctccctctcattcactctcaaggctaaaatctgatgtgtcactctgaggttaattctcagcttcagcttcttttttcttttcttttttttttcctcacacaacacacacacactcggggctgagctcttctctcatcagaatgagaagattcaaaatttgaaaattttcaaaatttgaatgaaatacacaaaagctgtctatgagacagagtttgcagcctactgtgcctattatgtcacctcgccgagctatggagctgaccaccaagaagcaccatttttcaagcaaatgcattcctcagttcttccatttttcatatttttcacttcacctcagcgtcttccaccagtgtgtgacaatagctcttcacggtttgttcctcaggtcttgcatttctgatacttttcttgtctgtggtatgttattactttgggaatcaccattttctttaccttccttgcttctggtattttagcttttcagcttggttttggtaacttcttttagtcatatttggttttctttttttctttttgcctctgctatgttacttcttgaatcgcggttgaaaacactttcgttgctttcggttttttttttttttttttgccgtgcttgccatgttcaatgttgtaatgaagcaagatattggctgacttctttgtgtatcatctatcaaacatttgtaaaactcttattttgtatgtgggctaaacctcttatttgtttgtgtaacttctgtggtttgttattatgttgattttgttgagtgatatattttacttatgatgcttttttgattgtgttagtcagtatatcagaaaatcatccagtgtgttactttaacagttcagttgtttttgactttttctacttctattcgtctacatcttagtgaaactgtctttgttatcagcctataaaatgttgtacatctttgttaatggactcacatacttacttatttgtgtatgacccattaaacatacggttttttttttcaggtgtccgtaaaaatattaaataataccagacttttaatctggataatatctccattttcaacttggttattaatggctggcggtaagtttttaacatattaaacaacaaatatttttttctatgtccataaaattacccagttgttatttgtgtatttggttagtagtatttcgcaggttgaattctataggcgaaattaatgattccaaggaaacttggaagattgctattcgagtgataaacatgtggactatacctagatcacctaagtctacgactgagcttaaactaattgacaaggaggtaaggatatgttgtgtccataatttgtattatgaaggttaaataatgatatacaatattgtggtacttaagtgttgtttgtacagggtgatcagattgtagctcagatgaagaatgttgatgataaagtgcttaatgtcaattttgaaattggtcaaacatatgtgattcaaaactttaaggtggaaacaaacagtggttagtacaaggctacgcgacatgcttttaaattaaactttgtaaaagcaaccaaagctacgccccatgatttacctgaaataccaaacacaatgtacacattcacaatgtttgatgccattcataatggctctgccacacctgattatttaataggtaacctctgttgtaaaatttgtagtgcattattaacctttaattaatttggtggtttaacataatttggtttttcctttaagatgttattggtgaggtagttcaaatttgtcagtggaatcttgaaggacagcctaagaaagtgattttcacaatgaaggatgagtggtattgattattcaaattggtgttttacctcctgatatattctttatgaagtctgttatacattgtctttcgtattatagtttatgttattatgtgtctcaattgtgacacagtggtagtgaaattagttgtactttatgggaggcacttgctgtggaatttaaggagtattttgaaaaagcattgcctggaccattcatattaattctgactatggcaaaaataaaggaacctagaggtatgttaccttataagtaatacatgttcaatgtatgcttcaatgtagttaaacattaattttatacttcctgatttaatgcaggcaattatcctgtaggaattcagaattcaatgtatggatccaaaatatttgtagacaatgatatgaaggatattttggaattcaagaataggttggatttttattttggttaatattgttatcacatacattgttgtattttaacatatttgttatgattgaacaaattttttcagaatggatccaagtcagttaagcacttatacatgttcccaaataggaagtcaaatgtcaggttcttcaatctatgctgtggcagatcggtttctttataaagcttgtgtaaaatctttagatcaacttgcccaattaaaaaaggtttgataaaaatttcagagtctgttaactgcagtttgcataaactgatttatttattttgttgaaggatgatgtttgtgtcactgttgctactatatctaaattattggtagccaatggttggatttatgatgcatgccctaaatgcaacaaaaaggttaatgcacaagctgagccttttatttgtgttggatgtggtaatgaaagtggaaagacaatgccaaggttagtagattatatataatttataatgtgtccataaaatacaaatagcttgacataagtcagaaattcagttttgttttttgtaataggtttcgtatagatgtcagagtatctcagcctggtgaaactgctatttttacactttgggatcgagagtgtgttgctttgattcaagaaactgcagctgacatcaaagagaaaatgattactgaggttatgctggctatatctatcattttataggctaattttccttataattcattatattgtaatatattgtaattgattgtaaaacattgataattgtctttgcataggaagggcaatttgatccaagagatatcccggaagctcttgacaatatactgggcaaaacttgtgcctttcgattcaaagttgttccaggaaatacacgtcattctatctctcagttatctgaagataatggattaataaagtctgtgcttgccaaactatcaacgtctacccttccggtatatatatttgtatgtgtgtttgtgtatttattaaatttatgcactcaagaaaccagttagtaattaaatctttttgtttttatttaggatgatcgtcagccttccttgtcatcagcatcccaaactaatgatcttcttgatagtgcaagtgatttgatgttttttttttagtttcattgtttttacacacaccagtgattcctgtcgactaattcaattcattccatggttggcttgcagcaatgcttctcagcgactgctgagtctgatccaaatttattgtcttcaatgacaccagctaagcgtatttgtaccaatactgatagccaattggatggcattccatttgaagatttatcacaaatcgaactatcttgtactaggatgaaaaaacatatcaagcaggagtcatgatgatgacgtgttattgaagacttgtggggtttttttgtttcttaggaccattgtattaaatagtatgggtttattttggcactttttgatacatttgtgttgtaatacgatgtgatccagacattatttttgtctttaatacaatgtacttattttataattatatctgcaatatctgcaatgttcacgagtacaacatttccagcttcttcttcctttctcagtttgcttccagggttatgttaaacaacagtctataaacttggtattgtacattgtgtatgcaatttataaatttagctgagttgacatcaaagaataattattgaaggcattcattttatttacaccaattgaatcggagctgaatattatattttagtgttgtaaatataagaaagtcatatgtttatgcaccatgactacatgactttttcttccaggattatgccatagtggaccagtatttgacgtgaataatattttacaccagctgatacattatacattgtattctataatattcagctattagtcttgtggatggaaaattagaccaattaaaattaatatgatgttcacgaaaagaaaaacaaaattaagaaagtacaggacaaggtggctataacctggctagaagtaagatatactgtcatgaaccattaatttggtgtgactatagaatacaatcagaaaaagtaagttgccaatggttattgcaggcaatgtcaactgacaaatgaaagctatgagtgataatatgagtgataatgtctcatctcattaaatgtaacagtggaagcccaataacctaccttgtccttttggaaacactttaacctatattgaaactcacttttacaacgtatggcaaagaaatagaacattcataaaaaacaatgcagtttgcagacaaatttatgaagaagcaaaaaatgcaatgcactgttgacacaaatacatagtttctcaagcttttagttctctacagcttgccttccagatactcagaagcatttttacataatctgtccacatagatactgagttatttgatattgttgttgttagttgtggtcatcaataacaccgtaaatgatgggattcacatcagtttttgttaatggttgagctgagcagcattaatagctctggtaagtccaggtttttaacaatgtttggtgagccttactcaaatgaatagtaaaggtagatacttagcttttcaatattataaacctgctattaacggtcataaataaatgtatgttttggcaacatacatgacaatctgcattgtttaatattatttgttgtggtcagaaccactatatttaagtagggctatcaattaatgtcaaaaggtacacgcacttaaaagatattgaaccctcacgtattttttgtgcaggccaaccttactatttgaacaattgcacaaattgaaaatggaacaagaagttttgaaaagaaaggctgcggcaaaagtggcaagagtgaaacggaaatttattatccaacacaagcatttatcacaacagagtactgaaaacacaggtaccagtttaattaaactgaatatcaatataagttatttaacattgaagtaaccagcttcttaattgtggcagttattatttttaatataatgaatcactctctgactttttcagctcagctatcagatttgactaatgctgcaaatgctagattaaccagaaaacttatactgcaagcaaagaaattaccaacaagtaaccatagtaatggtaacagaattaacaaagtgaaggaaacaacaggtttaagatatgtacactgataggcagaacatctgtgaaatcatttgatttcatacattggtgttattagtgaaacactaatgataaaagattttatttttcaggtgctgttaattcacctggaacaataggtcgggaggtatgtagacagattccattagccgatatcagtaatactcaaccacagtcaactgagctcccaaacaaacgatacaaaactttggagaacacccgttcggtgcgagcgaatttgctcaatcaatttcatgttgcatcttcaacttctactgctaataaccataatcataaccatattcactgtattgtgtccgaacgcagagttgagccagaagagcaaatacttggtaggggtgaaatacttgatggatacttaatattcctttgtaaataaaattattaacaagacatgctcataactgaagtataggaatattatgcactatgcagaacacagtcataattgggttcaaaatgatgatggtgtatcacaagaaagccagaattctgatcagcagattagctcaggtttgtaccaactacaaataagtgttcaaaacatcaattttgacacgaggacgtattaaaccttcatatacattagaaatgttttaatacacatagtcaaaatttaagtatacggctattgcggattatgcagaacacaatcttaattgtgatgatgatgatcatgtgctatccgaagaaaggtataattgtaatgagcaaattagcacaggtctgtaactctattcacagttaaaatagttagacatgaactgtttttggttaaataactgttatggattatgttagactaatgttttatttcttattagaatatcttgatattggagacccaattagtacatgtacgtattgcaaagcttgtatgtggtatcaagaaagtaagacaaagactagaagcaaggctaatgctaaccacagcctttgttgcagcattgggaaggttcaacttcctttgctaaaagatccaccgttactcttaaaacagctactatatgatcacaatgaaccgcaaagcaagaattaccagaaaaatatcagggcttataatatgatgtttgcttttagctctcctggtgccaaaatagataacactttattgaaaggaaaaggtccacctatttatagagttcatggccaatcatgtcatttgattggaagcctattaccaatgcctggaaaacaaccaaagtttgctcaactatatatctacgacactgaaaatgaaatcaataacagaattggtgcaggaaggtaaatatagctattttttaaagtgcataatttgacattttgcaaaattttatctgaactcacagtatgttatcatgtttagatggcaagatactcttgatcgacaacttgtgtcaaagttaaaagatatgttggatgaacacaatgttcttgctaaatcttttaggatggcaaaagacagatttaacatttcacaagcacaaaatctaaatttgactctgatagcagataggaaaaaggatggaagaatttataacctgcctactgtttcagaagtggctgcacttatagttggtgatgcgactcaacctatcaatagagacataatacttgaaaaacaaagtggccgattacaaaggatcaatgagcttcatccatgttatcttgcattgcaatatcctttgctatttccgtatggtgaagatggatatcgtaatgatataaaatatagagttatgaacaattcaaatgaaagaaagagagacaaagtaactatcagacaattgttgtcttttaggctacagtccagaaatggtgaagcccaaaccttattaagatccaaaaggttatttcaacaatttattgttgatggctatacaatgatggaagcagaacgtttattgttcataagaactcatcaaaagcaactacgttgtgataaatacatcaggttgaagacttctcaagaagcccataacaatgtcactaccatttgtgggaagcgtattgttctaccttcatcttttgttggcagtcgtagatacatggatcagttatattttgatggaatggccatatgcagcactgttggctttccagatttgttcctcactttcacttgtaatccatattggcctgagatccaaagagtcctttcacctcttaagttaactgcagctgatcggccagatattgttacaagagtatttaaaatgaagctagaccaactaatgtctgaattgaaagataaaaaaattttaggcaatgttatagcatgtaagttctgcactcctaactcagacagtcctctctattgtaccattgttttgtaaatcagtttaaccatgttaactttcgttgcagatatttacacaattgaattccaaaaaagaggattgccacatgctcatatcttgctatttttagctgctgacagtaagtatccatgtcctgcagatattgataacatcatatcagctgagataccagatgctattgaacaaccacaattgtatgaatgtgtgaagaatcacatgatgcatggtccttgtggccaagctaacagaaactctccatgcatgaaagacggcaaatgcagtagattttttccaaaaaaatggcagcctcaaacaattgttgagcaagatggatatcctgtttatagaaggcgaaatgatggaaaacaaattgtaaaaaatcagatacctttagataacagatatgtagtgccatacaatccaactttgttgttgaaatttcgagctcacctcaacatagaatggtgcaatcagacgacatccatcaagtatttattcaaatacataaataaaggttatgatcgaataactgctgctgttgtacctgtacaaaatcaggatggtacaacagggcaatcggttgatgaagttaaacattatttggatggtaggtatatttctccttgtgaagcttgttggaggatattttcatttcaaattcacaaaagacttcctgctgtagaaaggttgtattttcatttacctggtgaaaatgcaatcatctttgaagatgatgatgacattcaagctttgttgtccaaaccaactgttaaggactcaatgtttacttcttggttacaagctaattcaattttcaatgaaggaaaagagctaacatatgcagaatttgtaagaaaatttacgtatgtcgctaaggaaagacagtggaagccacgaaaaaaaggctataccattggaaggcttaactgggtccctccaagttctggtgaactgttttatcttaggatgttgttgactgtgattaaaggacctaccacttatgaacaaattagaacagtcaatggtcaactttatccatcatttagagaagcttgctttgctatgggcttcttggacgatgacaaggaatatattgaggcattaaaagaagcataccagtggggctgtggacactttctaagaaagttgtttgttaccatgctgatatccaacagtatagagaggccagaacatgtgtggtctcaaacatgggagtatctaattgatggtcttttgcataatcaaagaaaaataacaaacattccaggtaaaaaacagtgaattttacagttctttatactattacagcatgtattgttaaatactttcgttaattatatttttttgcatttagatttacagttgtcagttgaagacatgaaaaatttagcattgctccagattgaacacatgttacagtcaaataagaaatcactaaaggattttccgtgcatgccttttccaagaggtgtagatcatccaaatgttgggaatcgatgtatttatgctgagcttaattttgacaagaatcagttgcgtctggattttgaagcatactttgcaagtttaacaggttaggcaactaaattttagatacaaagctattgacaattacattaatcattccaaatcaaactgcaattaacatttgtagaatgctgtctgatacagatgagcaaaggcaggtttttaattcaatcatgaatgctgtaactagacaggctggtgagttgttttttttatatgggtatggaggcactggcaaaacttttatctggaagacattagcctctgcattgcgttccaaaggacaaattgttttaactgttgcttcaagtggtatagcatcattgttattacctaatggcaaaactgcacattcaaagtttgctattcccgtgcctactttggaaaactccacttgtaatatccaccaaggcagtgaacttgctgaactattaaaggcaacacaattgataatttgggatgaggctcctatggcacacaagttttgctttgaagcattggataaatcaatgaaggacatcatgtctatatctgataccagtaatctaccatttggaggaaaggttgttgtttttggaggtgattttcggcaaatcttacctgttatacctagaggcagcagatcagacattgtgcatgctactattaatgcctcttatctgtgggatgattgcaaagtcttaaaactgacaaagaatatgcgattatatcagaactcagaaatagaaaatgctgaagaaattaaaagcttttctcagtggcttatagatgtgggtgatggaaaattaggcaaaggtgatgatggattttatcaaatagaaataccatctaattttctcattacagacttcaatgaccctattgaatccattgtcaaccatacctacccacagatcaggcagaattataacaatgaagattatctaagcagcagggctatattagcaacaaccattgaggttgtcgatcaattaaataagcatgttttgaacattattccaggtgatgaaataaaatatttaagttctgattccattgacataacagatgctgctgataatgaggcttaccataccattacaccagagtttctacattcgttgaaaacgtctggattacctaatcatagaatcatactaaaaataggcacacctatcatgttgattagaaaccttgatcaagcagaagggttgtgcaatggtacaagacttattgtgtctagaatggctactcatgttattgaagctcgaataatttctggtaaaaacattggcagtttggtgtatgttccacgaatgtcattatcaccatcccagtctccatggccattcaagattataagaagacaattcccaattatagtgtcatttgctatgaccatcaataaatcccaaggccaatcttttgaacgtgttggattgtaccttcctaatccagttttcagccatggccaactttatgttgcattctcaagagtcaaaagcaaaagtggattgaaaatactcattcacgacaaagaaggaaaagcacaaaatataactaccaatgtggttttcaaagaagtttttcaaaatctttggtatgtgctcatgtatatttccttttatacatttgatgtttgattttcagctattacaattaattaatttttccttggatgcagaatgtgtcttctattctattacttatcaccatcctcacctggacttggaacgttagtttataccaattgtgacattgttggtcctggaatgcagcattacacttccactctgtatatcaccaccatcatcaggagattatatcatgttaaattgtacgaacatgaaatgtacacaactattgctatcagctatgtaaattttattatactgcaaaaagtggcttctgtcatacacaattttttgggttaacacttaaatagaatgaactgacagtaagtttatgcctttttaaggacaccagcattacacctaacaggtgagaaagtggctcctgtcatatgtttatggtaactgtctaaacattttctgttcttatcgcagaccatgttaaaaatcaaaatcattcaacactttttcctctcagcaatttcatgtatgacactatttgctagccttttacacaattgttgaatccttgtcacaatgatgataacatctaagctattttttgcacattatgacatgtcctggtgtgaatcataattaagtaactatatataattctgagcacattcaaatgtttaataatcttcttgtcatcaaatgctaaaccttgagcctgctaccatttgcctgaagccctgaaccttatcccaatgcaacatttcggccttactacaccattcttagtggattatttttaccacctattttcctaaatcactctgtctaacaaacacatacctgtagcttcagacagcaaaccaaacccgatgtgaacacatcacaatcttaatataaattctaacctattttttaaaataaattccaagcctagcacaatagttgctatatacttgattcaatttgaaggctacataagttgttctcctcaaagctgtgttgtctcacctaattgattttgccttttttaaaaaatcttttattgagcataagacttaatattttgtaagaaacaccaaatcctttgttttctacatcatatgtgttgggcctttgactctagcaatatgcatacagcaaaacttttagaaaacaccataccgaattgcccaactctctaccatataacttttcattaacatgatcaactttaacagaataaaattcttttacaaattaatatctaataagtttaccaattttgcgatacacatatgaaatcaataatatgaaatttctctcttggactaagggaagaataactctaaaaaataactctacaactattcattcaccaccaaacgtcacaacctttcaccgcacttcacaacagttcacaaaaaccaatagacaaagttagtacctttatatatatttgaccgttaacatcaggacgttgaaacacggaaccaatttattgatatcaagatttaaattgccttttactttcaatcaatttgttcgtaactcaaattttttattgctaagaccctttcgctagacacggttatttgcaaaacagaagttatcaaatggttacaatcaaataaaaggtcatttgcaagcagccatcaggaggacgcttaccaagaagaagacacaaaaacactatctcagactcagtcaatctcatatccaaattcaacagccgttgttatcaacagttaagtatttttcattgtactcctcataacaccatttatcctttcttgtatacaaatgagaaccatattcactatcatgaataaattaaaattttttatgttgttcaacacaattttcatgatttgccttgcagctttgcatatttacttatacatgatattaaaacccatattgtgtctcagacccaagttttctttgttcgttgctaactaagattatgctgtggctatcatttgcttttcatatttcattttaagaataaaattacattttatatcaatttttgtatagtggttctttgtcatgctttttcaatgaaaatctgcaatagcacaggtggataaagattctacccagtatctcattttcatatgctatttatgttggttcattcgtaattttagacaaacttgctaacaaacattaggcatattaatctttactgcaaatggctatatcaaacctcattattttaaaaatatcttaacatatccagtcaaatttttattcgtaaatttacaatcacaatttcatatttctcatatacatttctgttactcaccaatctttgctgcaggatctaccaagtgaaatgtattactttttgcgtgattcaagtttcagacagattacttttgcaagaacaagagcatgcaaagttatattcgatcatcaccgcaaacgtgctaggattggttctggttggaaatctttggttactgatttcaacatcacaccagatatggaattgatcattgagttccctaatcctaatagcaaccgtggatgttggtttctttgttaaacacatcttttgtattcagcttatcttttgatgcttggaaaaagtatgtttctaacaatattttgtttatgtatgtaactaacaaccatctttttaacgatactttgtttatgtatatatttgtttatattttgtgtttactctataataactaagactattatattttataaattttcatatgttcttatacttaacttagtttcacaagaattagctatttcaatacatggatgttaatcttagttttaaaaattctaatattagttttaaaaatagtaacgaatgaaacgctacaattaaatactttcgatttcttaatggagtccttaatttattattagcttatatatttagcaatttatcttttacattttatttttaagtttgcttatacaaaaatccttaatcattaaacattaaaaatattttattcaaatctagcataacatggcggagcgaagcggagccgtcccgtgcgtatgcgcacgggtccaaaacaagttagatgataaaaacagtgggcttggtgaagtggtagagagagaatcgcagatacaggttttgctgctcccatcaaaagggtgaaacagtaaattcaatacttatagcatatttaaaaatatttacttcttaagtgaaatatgtgatatgtggactttcttagaaaaagtaatatgcacatatattcattaattatatagtttgttgcttcttattttcttttatttattttacgcataattactgttttaactccctaatttagggtcttatttttttaatttaaatttcgttttaggctcttgccaagctgagaataatagatcgataatttgtgatgatttttaggttccataatttgatttttaattttaagctaccaaagtttgcattttaaaattatcataatcatgaaaaggattaaaaatggcagttttcaaaattgaaagattaaaaagaaatttagaagactaaaacattttaatccccaagttgagagagtaaaataataatgaagtctttctttgtatatatcatatttcatattatcattataactaaaattaattctcctattttttctctcttatcaaataacataaaatatctatgcatcgttattttaacaaaaatgagcaaaaaataggatgaaatataataagatatagaagttaagtaaaaaggcataacatgattttttgttcagtattaatatgcatttaatgtatccttttatgtttttaatatcaacataatatttaacaagttgtaactaaatatatattttatcttcaaagttcaaaattcaaaaactatctttttctctcaataccagcttaaaatcacatgcgttatactgatattaaatttaaacttcataatgtgtaatttttatattattataaattttaagctatcattttttatatttcattaaaaataattttatattaccaatctattaatcaattaattaatttttttataattaacatagattggtacatttataattaacataattacaatcaataatcaattataagtaacatagattatatataatatattaattaataattataataataatttgataattaaattaatcaactaattatatagtgtttactaatcaattgtatatatgagattatgtaggacagtataataaatattttatatattaataaaatttaattataatctactatatgaattagagtatgtaggacaatataatttaaaaattgaaacaaaaaacactcaaatcaaacaccatcttatcttatttttttcttatggttaattacaaatcattcattttgtcattaccttcattttgatgagttaagttgattgtaattgtaaatatactcaatgttattaaactcatatgaaacttagacaatctaattcataaacaacaataaaggagtagatagagagagagaaaaaaaataaggattttatgttggttcgatcaacgtaacctacactcaaagggagacaaaatatgaaactatataattttgcacaaataacatataaatagtcttatgttatatacaaacacatcaaatcgtaactaaccaaaaatactatcctctcaactaaccctgaagggtcttgaattatacgatcatttaccaaatccaatatatgcttgaacttttgattagaaaacaaagtcttagtcaacatatcaattggattgactgttgtggctatttctttatggaaaacaaattacatacactcacgaaattcactcagcatcataggttgattttttagctaaagtcaatgcactatgaatatctcaacaaaaaatatgtatttacatattcaaacccaaatcatgaataagatcttataatttcatacatttttttttgtgggacaaacaggtattcgagacttcttatttaatactcatctaactctcctcctcccatattagaccatattaggataaaataatatttttaattatgattcaatgtccaaatcgaaaatcaaattccagtgattaacgtatcttcttcaactccttttgttaatgacatatatacttcacttttttggtagacaaagcaagaataagttaaatcattgctctccaactaatagcacatctactatacatgtataaaaactaactgctagcaaaattacaaaattggacatcctatatttgtgacacttggcaaaaattagggacaaaatggtaattggacataaatttactaactgcacccctttttaataagtgcactccagtattcccaaattaaaacttgctaattgcacttcctattttataagtgcactcaaatattttcaaattagaacttgctaattgcatcccctttttgataaaaaaaatctatatttctttcatccctctcgcacgttatctctttaacacatagacaatcgtataaatgaataagaataagtaacattaaaaaacttccttataaattccactctttagatattgtcttttattatccaatattagtatacataaaataattattgaactaaaacatatagttgttgatgtgaaaaaataggttatagaatataaataataacatgtctcaaagattatccttacatcttcattcaaaaacaacagaaatttgtttacactaaaacttaaaaaggaattatttggtcacatggtgtcaatgaaatttttggtcttaaagtagtatatttttctttgtattgcagatttgcatcactcttttaattttggatctaatcactttgttccccaatatacatttttcgatccccatttggcctcaggtaaatcacaacacaattgaataatggtgtccataataaattccacaaaattgtcaattatacatttttaaaaaaaatattttttcaaacaaaaaataaataatgtaaaaaaatcgttaactgataaatcctaattgaaatgtatttgtcaatgtaagaaattgataattgcaccccttcttaataagtgcactccaatatttttcaaattaaaactttctaattgcaccccctttttaataagtgtactccaatattttcaaattaaaacttgcaaattgtttccttttaaatcttaaatactcattatatcattttttcatccctctcacacgttatctctttaacgcgtaggcagtggtattacctgtatacgcagggataatttttctaaattaaaacttgataattgcacatccttttttataaacaaattaatatttccttttaaatcttaaattttaattatattatttctttcatccctctcacacgttatctctttaacgcgtaggtaatggtattacatttgtacatagggtatcgtactagccagttacaaaaatacaaaaatttaagtagaagatcaatgaaatgttcaataaaatgttcaatgaaatgttcaattgttaaatttgatacagaacctctatgaaagtgatcattaacacaaacagaagtgaataaaagtaatccagttgatggttaagtagaagatgaaggttcaaagttaagaaaaggtgtaagacaaatggagagaaatgaaggtattacttgggtaaattgaaagagaagacctaaacaggtggaaagtttagtagcaaaacattaattttgtataaaattttcagttattttctttaatttaagttcataagtgaaagttgcttgctacatattacaattcttgcttagattgaaaattagtatttttgttccaagctaatttttttactttttctatccatcttatatctttatcttatagtgattatatgaattaaaattctaacaagttctcaatcagccatacattagtcatattccactcaaattatttaaattttcaatctttttgaaattgttgtgacccatcaattacatttatagacaatattaacaaaattgtcaagaagtactacattacaaattgatcgtcaagtgtctacaattatattacattatatctatatacctatttttattaaataatctttctttatgacacattcaaaaggaatgctaacaaacacaattgaatataaaagatacatataaataagtattataattttcattagtgtgtttacttataattgtcatatctttatattacacacaacaaatataatttcttatttttattataaattcatcattttcttaatttctaaaatatttatatgtttacttattataaaaataggttttcaatttgaaacgaatcgaaacccagcaaatcgatacatcccgtgcgaacgcacgggttaccgactagttattcataaataatgaagataaaaagcatgtttgggaaactggtgaaagcccctcaaacgtaagttgagtccaatagtattagaggaattaatttacaaacctaggtttgggatctcctagcggagacctaaacatgcacataaaaagttatatttgaaagggttctgaaaaacaattataatgaataacttcctaaaaaagaaaaaaaaaatatataaaataatcacaaatggatgagaaaaataaaatataaaaagaccatactctatttatcttcatttaaagttaatatataaaggaaaactccctacactggtattcaatttgtgttaaaatataatttatcaacaaaagaaatataaacaagtaaaaaataattatctttatttaatcacaattatcctctaattaatatttttcttatctaatcataatttttatgctagtgtaaatgaaaagactccttttttatataaaaaaaaccacttttgggctctgggccttggcccgacttaattggatcttgcactgtataaaacagtgttagttgggttattctaaacgagtgtatggagtgaacaatattttccctcctccaaggtcccaatttttcttaaaccctaaaacactctcactgaagaagctgctgcagaagagaatttccatttttacaaaatgtcgatgtcgaagagttccaagatgcttcagtacatcaactaccgtatgcgtgtcaccattcaggacggtcgccagctcgtaggaaaattcatggccttcgaccgccacatgaacctcgtcctcggcgattgcgaggagttccgcaagcttcctccgcccaagggcaagaagcctgccgaaggcggcgaccgcgaggaccgccgtacgctcggcctcgtcctcctccgcggcgaggaggtcatctccatgaccgtcgagggccctcctccgccggaagagtcccgctccaaggcagtcggcgccgccgctctcgccggccctggtattggccgcgccgccggaagaggtatcccacccgctcccgtcgtccaggctcagccaggccttgccggccctgtccgcggtgtcggcggccctgcccctggcatgatgcagccgcagatctcgcgcccgccgcagctcaacgcacctccggtgtcgtatcccggcggtggaccgcctgtgatgaggcctccagggcagatgccggggcaattcgctcctcctcccatggcgaggggtccgccaccgccgatgccgcctgggcaatttgcaccgccgagacctggtggccctccgccacagttccaagttccgccgcagtatggacagagacccatggggcctcccccacctggacagatggtgagaggacctccggctccccctcgccccggaatgccggctccaccaccacctcgccctggcatgccaccgccacctggcagcggtgttccggtgtttggtcctcctcgccctggcatgcctcctcccccaaaccctccaaatcaacagcaacagtaatgggagagatgattggtaggtttgtatttgttgttttgttcaatcctctgtttatgtgtttgagtgtgtgtttgcagaattgagtgagtcagtgagtgtatgtgtgtgagtgtttgagtgtgcgtttgtaaaattgatttttaagttatttatgtttgattgattttactataatagctagtttgatgtaaaatttagtttaaatttttcaacatcaaagttttaaattgctgctgccatcgcattccttgatattgttggaatttgtggacaagtctgccacaattgtggccatggacatctcaaattaactttgaccttgcgacttaaatttcaaatttattttttatcacctctagtctgacaatgaccaaatttgtatcttttctaaaaccatggttgacaagaggcggaatcaatttgtttaccatccactgagcatccagacacagattctatgttttatgtgtatcttgcactcttcctttttgtgtgagagatagtgatgtctagaaggaaaattaaatggtaaattaggattaagatgagatcatgcattttgtaaggaaaaactaattttgttatcataaatctctcctttgtttttatttgtaagggtgttggagccgggtgggtggctattaataataccaactcaaatttatgtttgggcatgaagcaaattttaacatcaataccttttagtcaagtttctagactcattaggatagctatcgataattcgacatgattgtgacttttgagttgcagagtaaaattatagtatgctgtttgccataaacaattttggaatttacctttttatatactgttttaagagaagatatatatgtatattgtatgtgtttgtatacacatacgttcccacccttttgcctttccatcatgcatcatctttatttgtggccagataagtgctaagctggctttcttggtgttttattgttattctgttggtaaatcatcaaggaaagataactttcctgcaaactagtataagctatttgcaaacgctaaccaaggaaattaaatgctaactgatccaaatggtggtaaggcaaatgtgtaattctttctgttccctttacctttgtaaaggagcatgctttagcatagttgtcaatagtgccaaatagtgttgctatcccgtgctcgcaaagtgttgtggctggagcattttacaaaaattgaatagctctgcagtcagtgttatcaatggtggatggctgaaatccaaatttctgctacataaacatgccattgcaccctatggtgctgccatagtgggcttcccttcacattgttgtctatggtggttggcaaaaaaaaagaaccgccatggcggccttggcgctgccaaaaacccatccttttctgggaacatatccagtatttctcagcattttctgtccagttggccatccccaacatctgcagcctctgctctgctctccatagtttatgatcatccctgagaattatgcggccatttaattccagcgaaatgtgacctttgctgccttgctttgttctgttcatatgttctgtttttcaatccctctaaaacaggtattatcttgtattctaactctcctcaaagtttatcctttaatctttttattctaattggttagaataaaagccatcccgcagttcagctatagtattttcagggtctgcctctcagccaatatttgggattgacaactatgagaactgcctattcttaatgttggcaaactcaagagtctatgtaaaaatcatgttatagtcatatatgagtctattttatagtcttggaacatccattgacttgatattggaactgataagagtttacttcataaaaaaacctatcatagattcatagtatccaaaaataatttaatagcatcaccataataaacattcatagttccgactttttttgccattgccctgaatatatgccccatgcctccaccctagatcagtcctattttcaagagtgttcatcctagtttcggtagctacagtgttgcttgatttgcatcatggtaatggatgagccgtgaactgtatgtttcaaatcaggccaaaaatgacaaaaagtaaattttgttacgtcaaaatactgtgttttgggaaaaatagatgtcacaggacagtagattttcaggctcttggacttgagaatttatacatgtctacccaatgctactcactagactgccttttggcgagaaattacatgactcaagcttgtggactgtcagattccctcatgaactagtgaatttatgcacgtctaataaattcttcttaaaaaaaaaaaacaatgtaactcaactggttttcttgacttgtgagtttgacaaccatttctatcatgttcaaattacttttcactgaatcaatgtatccattactgttgacatcttaattactgtccaatttatatatttattttattttaactaatgatttagcatggttgaggacattgcttctgtaaccagcattttagatgttagtggtctattgtctaaaatatatggtgatgatatggtcttctatttgatctatgaaatatatattttcctattgttttttgtggttattgtctcattgtggtctgtatttgtgtcccatccttgtctcattctatgacttgaattttaactgctctaatattatttagcttcgaaacatcaattttttgcgttccatattaaacttaatatagtagaattatgtaagattcttaacaagggatttatatggcttttctccatcatttcctgtgtattctgtctcacttgtgaaatcttttacctttgtcattgttggactgcattcttttagcacattcactgattatttgaaaattatcgtgattgctcttgattgagactgactgaattctgcttgcatatagtaatagagaacttcaaattattgtggcaggtttcttactgttaatctgaagatatggactccgagcttcttgcacgcaattcaatatccagcttgtacttgggaactgattgtcttgaatcactctcttcttagggattgtttttctgatgtcttgatgagaatgtgtaatgttagaagaacaactttaagtattggagggagttattctactaaaacctgagcattagacatacaagtcggctgtgtagattttcaggtgaaaaatgccggattgcatagacagcgttctgatttgagtgtaggacaagaccccccatatcatttgggttaatattacataattatgactttgctaatgtttctggatcattttattttttattttctgcagttatttgcgctttgtttttcttagtgtgtatataactatatatattgtggagacgcaaatgtaataggaagattaaccaggaactcggtggattattaaaaatcggtgatgttgacattctaacatatctagaagagagaaaaaagagaataaaaaatagatattttggtcttttaagtagtttgtatcgagtaataaatcataaaaaattatcccatccaataccacatttttttttccaaatcaaacaaaccccaagttaattgaattctaactagatattccacacagaaaatatacccctaaattcgcagtattcgttgcaattcctgggttaagaaatttttaaccaaaactatgaggattaaaagcaagacttaaattgcaaataaattaaattatgagcctaacattactatttttttaagtgatagatttatatatattttatgacaattttatgtatgcatatttaattggagccaataaaaatgtaaaatttattatgttgtcaataaattataaatcgccatataattgaaaacggtttatttgtgtgattagtattttaaaagtcataggattttatttgattgactaacgtctatatcaatcaatagtatattaaaattaattacttaaatcctctaaaaaaattaattaattaaaaatacacttataatatacttaaaattttccttgtgttgccaaccaattacagattgccatatcatattatttattataattttcaagtcaataaatattacttgttttaagttatcaatattacttaaaatgctatttagttattaatcaatacaactttttttttacaacaagagtaattaaaatatatttttttattttattttataaatggcgttccaccaagctagtttataattaagcacggcgtgaacggaaaaacaaaaccctttccgatcccatcgctttcttagtttctctccgtcttcaaatctagggttcctgcaattgtagttgccgttaccaccgtgaaccaccgcgaacgccaccaccggaatagttgccgccaatttcaggttcgttctctctctctctctctctctctctctctctcctcgttgtttgtatattgattggacgattgatattcttcgttggtaatgctgtgattgaaagaccgagaaggatagaagtgtgtttcaagaaattgagatgtaagcaaactagaataggataccgagccaaagatgttggaacagagaatgcttgaaaaaccattgatttattgttgcatcgtgttgagaatcaaagtaaagttgttttaatcattgggttcctctgggaatctttgccaattgacgatgaccttcgaccttgaaggatttcaattaacgtgtgagcgaaaaagtgaagttgtttattgtatactaatcaaaactttattcattagctatttaacgtggatgcttgctccaaagtactctgcttcttgttttctaatgctttaagaattttagcttttgttctaatgctgtttttgttgtgttcttttttgctttataacgtaatttcagctgtaaggaaacagtgtgtaggattactgataacgttttgtttgatctgaaatgtgacatccagattcgtgatgggaaaaaatgagtttctcacacctaaagcaattgccaaccgaatcaaagcaaaaggattgcagaagcttcggtggtattgccagatgtgtcagaagcagtgccgagatgagaatgggtttaaatgccattgcatgagtgaagggcaccagcgtcaaatgcagatttttggacaaaacccacacaggatagttgagggctattccgaagagtttgagaccacctttctggagcacatgaagcgcagtcaccgattcagccgtgtggcagccactgtagtttataacgaatacataaacgatagacaccacgttcatatgaactccactcagtgggctacgcttactgagtttgttaagtacttgggtcgaactggcaaatgtaaggttgaggaaacacccaagggatggttcattacatatatagatagagattcagaaacccttttcaaggagaggatgaagaataagagaatcaaggcagatatggtagatgaagaaaagcaagagaaggagatcaggagacagattgaaaaggctgagcaaatgatgcagccgactacttctgaggctgatcagccttctcaggttgagcctccgagggaactgaatatggaagatggaatcaagataggattttctcttgggtcatcatcagctaaacctgtggtcaaggaaaaacatgaggcgtcaagggtggtgtttgatgagggtgatgaagagaaatataatgaaaggaatcccagaaacaatttgaagaggaaagaaagtggaggtggaaaatctgctttggatgaaatgatgagggaagaagagaagaaaaaggaagaaattaatcggaaggattattggttgcatgagggaattgttgtcaagattatgagcaaagtcttggcagagaaggggtactacaagcaaaagggcgttgtccggaaggtaattgacaagtatgttggggaaatagaaatgcttgaaagcaagcatgtgctcagagttgatcaggcagagcttgaaactgtgattccacaagttggggggcgtgtaaaaatagtcaatggtgcatatcgaggatcaattgctaagctgttgggggtggatacagataatttttgtgctaaggtgcagattgagaaaggagcctatgatggcagagtacttaaagctgtggaatatgaggacatttgtaaagtaccctagtgagtttgatggaattaatgactcaatggttctgtttattacatgaattgtagtattcgttcttatgtttctttctctagcgtgtcatctttgtagcacaaatcatatcattatcttatattggatacaattcttggaaatttatatttctgactataattaggcccctaacgtgcaataaaagatggtggctgagaaggctgaaatatcatgttgcaggtgcaattagactacagttttattttgtagttttgtggcgagtaaagttgaattcttattcttgccctttgttttctgtttctttgaaggcttagtcaacaacaatcaagttttgattttaactgggagcctgggtggagtcaactacttgtatgaaatgacgccaatttattttatcataaatcatttttaataaacacaagttgcaggtgtcaaaagttaatctctgcttgccatataatgtttaattgaaatgcgattgaactctctgctcccttgtttgaaaaggctacatttttattaataacagacagaacaatatccaagcacaaggagtgtttaagttttgggacaaaattacttcaattgataaaaaattattccacaccagaacccctgcatcccacagcatataaaaaccacccatatctagtgcgttagagatgatgacattgcgttccataattatcattcaatccaactgtaaatgctcccaaagtcctattgcaatgaaacaccaaattggcacaaaccatatattgagtcagatattatgacatccatattttagtgcacacaaattggcataaacaatgcagcagccaaagttctgctattagtcacatgatgaatttcctacgcaaaggaacattaaaaatagatcgccaccgtacaccatgaatcaccttatgttggctgtgaagataatcagcatgagtagccacggggagcttcctcaaagaatcaagctagctaagaatattgattcatttgcttttctttctttttgttgagcaggagcaggggcattggagcaagagtgattcagagtacacacattggggattatgcaaatcttgcagcatctattaacaaatattatcaagaaaagaaaactttcacataggtggcctaagaaaactagaaaacttttctaaagaatcacaactcaaatctaaatccgcgtggaagtttttattaactaatttgataaagctgcaatatcagtgtcacacttttcgtttattggtaagttaaactgtttcacttgacactagctaaaggttaaaatattacacttcaaaaacaatttgtcacaagcatcacatcgcaggttttaataatttgtattgatcacaaagctgcaatcatcgtttccattttttagtgtctgtttaagtagtttgcttctattctgcattttgacttaatggtctcagttgcttccttcttaatgctcacaacaaatgttaggcttctacagttttgtctcgagtggttaaatttgattatttgaatttggaagcacagatatttataccataaaacaagccacgttccagtatttacccctctagaacataaaggctttgatctttggaaatgaaaatatggttatgaatttctttctattctattattattattattattattatttactacttactagctagtgtttggttgttttagaatttttgatagaattgattttgaattgttaaacaagtatatctaaattaaagtacttttatactgttattttatcacaaatcattaggatgagtttattgatttttactataactatcttgaaagtcgtgcttagccattaaaatgattatctttagttacagattttatattaaaactcatgtaacgtgtgagatagatttgtagtgacaatcaaataagcacttactctatgtcagcagtgtattctgtgatattctgttcaatgcatataggtatatagaattgcacagcttcgatgtctttgtactctgctttatttcttgtcttagttactctatactttggccattcattcagagaacaactttcacccaaaaaaaattcagagaaaaactgttcagaattcaaacctgtagccacggacaggcacagaggggttatcttgtttgtaaaattttccatatatatagtacgaattgtttctgcacgaatgagacaaccaggtgggagatattttcattggtttttaataaaataaaggaaaataataattatggagaataaaacatgatattaattaagaaagagtatgcttgtatttttgttttaaagtaaaaaaaaaaacctactaattttatttattgttatttattttaaaattttcatagtaaactatgtaattatatttaaggtccataattttttaatgaaaacaaaaagaaattaaacatacactatataaatgataaaaataatttctttaactaataaactgatatttaatttataacttacttagtattaaagtgacacgcaataaaaaatcatcttctattacattttttttcattttatattatattattttaatttttatgggtaattataaatttttgtaaggttttaaaaataaatattaaataataatgataataataaaacaatgccaatcaagggtacctaaaattctaaaaaagaagtactacagactacagtagtctcaaactgatattttgggtccaggtgctatggtggcatctgactgacattatcttcagttcactaagatatttagatttaatgggccccactaatgtgattttcttaaaaatatcttccattcagttgtgactccctctgcttatattttgatactctgatgctggtgccatcctgcattatctttttagctcaaatttttgtgaagcatttttattggtagaaatggagagtgagcccgtgaagcgcagaattcacatgattgctgctcactttgcacccaatgatgatatttcaactaccaacgttctgcctatggtaacatattatgttcttttacttatttgttcatggctggttcatggttcactagataatgatggaaaataaaggaattcatttgaattcagttatgtttttctcgacacatgggaattatttgggagttagatatagctaagtggggaaattgaacttatgtttctcatcttgtgctaactggcccttgttctccttttcatgtgaacagaaaaaaccatctaataggaatcttcatttattgtcatcgtaggacaatcaaactgcatataatttgagtattgtataaagtggactagcacttcattttttagtggctaaaggatgaaagtagctcgactgctcattggttttgaatacgagaaaatatgccctttcatctcatacagctagctttgaataaattgggaaatatcacctattcagtgtctgattttctatatatagtttaaccccgttgatattgcatatttgcgttaaattaggagacgtattagcttgtacagttgatgtcactatttattatgctaaagtgtttattgatcttgatgttcagcattggaaatttaattgtttaagttgcccttttcttttatgattggcttaggcaataataacttgaacactcttatcaaatcaatgcatttttgtaggctacaagcaacttcaaagtttttaaacttaagtgtttccttcatctttgtccctttttgatatttaaaagtgtttccgtaattcagaatttccatgtgctacacctttattatatgtttttagtagaccattaatttggttttatagcttttgttttacaatgtctaataaattaatctgtacgtactatcctttttttttcttgaatatttgtttgtaattcattttgttcatcaattttcctaccgctatcagaactgcagtggcagtctgaactctgtactccggagatgtgataataaggtgtattttgcacgccaagcttcttcttctcttggttattttatgaggcagacttcaattgaagaggtacttaagtgttcttattattgaaatacttaacagtgttcgatttactttttttgggtaagtgattcatttctcactggcttatttaatacaaatacactaactttcagggtggctcaacttcctttattgctcctaaaacaaatcatggtgctactgcatctgattgtctttctaatgcaagagcaccatgttttgctagacctgcaagggcagaatcagttttcacaaattcagtggtccaaccaatggctcaggagcagggctgtgattttagtacacttgatcctcctacatttgctaggccaaccagacagattagaggagatcagttacattctgaaaagaaaacgtgctattctgaaattggtggttagaactttgaactcggaaaggcatttgaagtaataatagttgaatagctataagaaacagatcgaagtatattattttgagtttaatttatatgcattgttagtgtaaatttttttatattgtcaacatataagaaataattattaatttgatttttaaggtaatattgtaaaagttaacaaatcacttgtgattgaacgaacatgaaaaaaccaatcacaaaccagtgcatagactatgtactctgtaatttttgtgacctttgttttttgcaggaattgagtggtctccaaggatggatgttgcagaatcagaaggcaaatatgttatcacagtggaagttccaggtgtcagtatcagtgacataagagtggaggttgatgaacaaaagtaagaagaatctctaatatacacccgcatattaattgtaatactctttgcaatttgtggtattaagcatttagttctccctaatcaatagaaaagggagtggtgaaggaaaagataaggcaaaacaaaatattgttggatgctctacttttgtctatgtcattattgtgtttgagtttttctttcatttgtgtaccgggggagggtcttgtctattaatacaaactttatacattatttctgcattgtaatataaagcataaattctggaagtgaaacgctaaatgtaaattttaatgttggacattcgtgatcatagagctttcgtagtataggacctcctttctttgtgataaaagagccaatgtgtgaactgtgacaggttgtgtgttaaaggtagacgctctactagcttttggacagttgcaggttgtccaaatgcttccttttcttcatatcatcggagggaaatactatatggaccatatggggtggtctggccacttcctgcgggtgtgaacaaggacagaatatcagctgaatttttgtaagttatatcttagtgttatgcacgtgtctcttgattatagcctcatattttaactccattctcaaactatatatatatatatatatatatatatatatatatatatataaaacctcatctaatttggtctattgcattatttaattttttagtaactttggtttctggctcagtcagaggactctcaaatgattatattactaacaaagttcaaactggaagtagtaataaaatacctaggtacctaacatacattaggaagattttggctgcaagcgatcacactgctaagccaacaataccaggctagtcattagtgatctcttttactaacacaaaatggagagtcaaattgtaaccttgaagttcaattgagttcactgagaaatttattggatatttaatgttctgttaggctaaaatagctgattcactattgctgcaactagctactgtaatgatggccatcacttttatactgttttggtacttagatcattatggtattttaaatacaaaaaaaaaaaaaaaaaaaaaaaaaactgaatctatgccaatcctaatgctttgtttggcagctagaatactgccatgatgattcataaattttcaactcaatgtaaaagctatataatttatcacatctactcaaggggaactctttcccctacctctctcctctattctgctctgctgaaaactgaaaagttttccccatatagcttaaaataagtgtactttttttgttttgttttggtttactgaatttgtatgtgacttcatatcattttattttaaaaaatatgcatgcatggggtcgaaagtgacttgaataatttcagggactagtatgtgatgtgtgtggttttgcacaagttcaaagatatgtgctgtacctataaacatttgaagctgataatttgttgtttctttccccattttcagggatggatttctacaaattatagttcctaaagtttgagtatgactgagcaatattgatttgtagcacatatatgtatacgtatacctataccccgtgcatatagatggagaagaaatgggcattgttctgcatgagccatgtcatgccgtatatatatttgtaatgtaatgagcagatgatgggttaattttgatttcatatacaacttaattgttgtgcagaaaatgtcctgatgcatcgtgagatgttcattctacgttccacttttgaaatctaatttattaagtcattaatacaccataccgtacaaaatgatacatagaacattgagggatgaatctctgtaggagatgattaaactaatcacatggttgaagtcgacttccaagtatcaatcatatttgataatttcaaacaggtctctatgctctcatgcttctatctgaaagggggtatgattctgaaactcacaaagttagtatttattatttatataaaagaaaaaagaaagtgttgaaaatatctaattaagagaatgatgaattttagtttataatataaataagaataaattcttctataatttgatgtcggtgtcactgccatagccaatgacaatatttattccttcaacgttcaaagtgggagagagcaattgcaacagcaccgatcatgcttattgctcactatttaggatgatgattaggtttagtttagtaggatcatgtagtctttattcatcagatttctttatttttaattaaaattacattgtagtgtttctcataatattatatcatccaaaattgtttaatgggtaacaattttataattattagtcgagataacttagataagtgatgtctcatttgatatcatgtgatggtccaacctattatagacacactcacatcataaattcaaattaaacaaccaatattcacaaactaaaataacaatgtataaatattttcttcataaatttatataaatgataaaaaaattaatccaataattaaaaattaacaatccactaaattgttaattgtgaaaagaagggtcgataaaaagggtaaaattaatcctaaacctaaagtgcaaaaaatcatcatcaatttcatattattaactgtagaacgttaactttaacgtaacgtcccacttcaaataatctttgaatctttaatgttaacatgatcttcaaaaattataatttaatattaaaataatccttaaacattataacttaataatatcagtccacaaaatagatatataaattaaaattaatgttctacacaacaatatgatattttttacacactttttttatattttcatgaactatttcaaaaaaattgtttttccaggaattaaattatcacccccttatattttaagggactatagtggttacccgtcctttaaaaaagaagatgtaagggaaaggtagggtattatagtttagtatatttcaaagaaaataagttctgatcttaaataaaagagatgtgaaaataacatgggccatgagaattctaaattaccttattgggcctcgacttataaaccaggtccataacatattgtaaacgacattctcgcagcttcgtctgcaaatgaactataactttacaatccgtcaatttacatcctctgtaaagtattaacaatttttttttatcccattattaatacgaaatatctattaattttatagataattaatctacgttaaaaaatttgatcaatcatcttttagtgaattttttttctctcaatcatatttttttattcataaaactcaaatccaaaatcttacttaaaataacataattcaaattcagtgtcatttgaactattggataaagaaaatcttataaccattgttctgcatttatgcttaaacgagaaagtggatggatgaggagttcttttttttcccattttttttattgatgagctctatccataatttaaaaccaatatgttagcttagattaattaaaatattatcactcaaacaataatcatcatactcaataagttggatcaggcctgccaaattgattagaaatgaattgactcgcttatcctatattttatataacattacttatttaaaaaaacaaaataaaataaaattagtactgctgataaaaaaaaatttcattaataatgcataaacataaactattgtgtctttttaatttcaccatttcaattaactttaatttaatattatatttaggggtgttcgcaggtcggtttggatcgattttgatcaaatttaggacccaacctaatcaaatttgatcggttcggttttagaaaaaaaattgaaacacaacccaacccgttcatgatcggttcgattcggttcaatgggttacccattttaatttattttcttagaactactattttatatcatgattctttcaaatattcaatacaattaacacaatattatcaaatgtatgaaagtagtaaattgattcatttaataccatcaacataatattctaaaatagacttataatataaattaaaacaaaagattcttgaacaagatttaatataatagtctgattcacaactatttcttacaaattgagctttgctataaccaaaattgttgtaaccagatttgctgaaacaaacaaatgaacagaaaatgattcattaatattataaacacgataaacaaaatatgaaaaaaaggtgaaacaaataacaatatacttgaaagtaatacattaagaagtttcaacacttgcagtttcaacacttggagacccaatattagcagtatttgaagtcaaaccaaacaactctaaaaatttaaacacaaccccgttagcacaaaaaataattgatatttatacaaatataaaaaatgaaataagagattacacacttgaatcaatcttttccgcttcatttatttcaatttgcaagtcattaacattttgcttagtaaatctaagccaattttggacacaaataagagcttcaacagtagtaggactcaaggaactacgaaatgagtccagaattctatcccctgtactaaatgcagacttagatgatacagtatatacaagaatgaccaatatatctctagtcatataggaaaaaatataatatttggatgtcttcaatttccaccaattcaaaatgtcaaactcagggtggtcatcttcaacatcatcctccaaatacctatctattttggacatccttccccttcactagatatgagatttaacacatatgaagcttcaacatactcatagagataaaatgcatgttgcagcaacatctaacatcaaataagttgagttccactagttggtacatcaagtattaacatggccttagtggatatacttacttcttcagcacaccttttaaaacttgcaaatctacttggagaagacttcacaaacttacatgcaactcttatttttttaatggataggtcaatttctttcaatccatcactaataattaaattcaaatgagcagaacatcgcatgtacatgaactcaagtattttattagaagtgaaaagttgggcttaatattatttattttaaaataaccaaaatataagtatactatttatctattaaaaatttgttgtgctacattactactgcctaaaattattcataattttgtccgaatttagtaacaaataaaatgttgtttctattaatttttttggcaaaagaaacaaattaattgggtcatatgctaaactatgggaaaaaaataatttttaattttaatatatatatatatatatatatatataatttatattattatttacaggttcacggattgggttaacgagtcaacggatctataaatctaaatccgtaacacaatccctacattatcgattttgatcggttcggttcgattttgacccaaatacataaatgacccaacccaaatagtttagatcagttcgggttcacggatgacccgtacctgtaaacatcgcatatcctttttttaaaatatatattaaacataaatcaaaaatcttttttttccattcattctaattatatatagcgctacctcgtagttttatgcatcggtataacagaaaacagcaatatatatatatatatatgtgtgtgtgtgtgtgtgtatgtgtgtgtgttttttgaaatttaacttaaatgttacagcccagccattcattattggtcatgactggcttcctgtaacaagcaaatataattaatgttaaataccagtacgacttctagaaatgataaatgacgaaacgataataattcattttaattagtattataaaaacaaaaattcgaaatagcgcgtacccaatgaatccacaagaaatttagagctcgaagtagcagtttaataatttaggtcaaaagaagaagcatggtagtagttagtagagtccaaaatggaatgctgcatttgcagtactaccaagttaagctagctggcatagcagtgtacgtagtggcagtcaacttcatgcactctctctcgataacaaacacactttatttagattactgcacgtacgtatgaatacgaaaaatatcaatctccaattcaataatgcagccaaggtcacaacattaagtagattagtgctgcccataatttttttttaaatcgaaccaaatcactctattaaaatggtttattttgaacaaaattgttttcatcataaagtggctagtttaactttaacttggttcggtgtttagtttagttttttcttttcctcatacgtatcaagtttttttaaagaactaaactgaattactttataaaaatagttttggttcaaacttatagatcatttttataaagtgattcatattcaattcttctcaaaattataatttggaatggtcgagttagaattgatattcttttcactcacagggtacgtacgtgagacttcattgagcattaaacattcagtagcctctttcttttgtattttattccttaaattaaaacgcgttctattctatttattttctgcctctttcttttgtatgtccccacacgctatctccctttcctccttaattccaaatttccaatgcaagacgacacaaaaatgttactttcttcttcccttggtccgaactccgaatcattatccttctggtagctgttgagagttatatgcaagtcattattactttatcaagaatcacaagtaggacattggaaaagaaacagtgcggattctgaatatttttgtagctgttgctgatagagagagtcctcgcgcggtgttgacaacccttcgaacgttgagacataggaatgtctctacttaacatcaaatgcaagcaaacgaaggtggtcttcaactccttttcatacctataaattaaaggtaacatttcaagcttcaaaccctggtcaaccactattagctagctataaatccatgatactactactagtattgcaatagctagtaaaaaaaaaacaccatattaaattttacctttcaggtagacttttatacgtatgtgtgggaggggagttaggggtcaggctacaagtcatcggcaaatttaaaataattcaaatcaattcaaacaatttaaattagatattttttgtgtttgggtcaaatccaatctaactcattcaagttcattgaattttggattgaattataagtgtaatatctagatccgcttatttgttgatccaacctattgacccgttaatttatattaagttgttattatatatatatataatatttttaaattttaaataatcaattactattattataaaacttatagtaattaagagtgagattatttttctcagttctcatgatttcactcaagcactctcacaaaattaggatttcaactcctagctgctgatagaacatctattttgctttttttttatttgttttaaactattttagatttagttgaaatttcaattatactactcatggtttgataatttgataacattgaaattttcaaactatactgtaataattttagttattgaatttttaggctttgtgagtgtgttttttaaacttgtttattatatttcaatttgtatatcatatttaatataatatattagcatatgtgatgatgagacaatgtgattcctctctttatcttttcttccattatttaactataagtaataattataagtaaaatatttggtatttcatttaataaagattttagcttttaaaaatattagattttaaaaaataatagacaaatttaaataatttgacctgttgacccaagtcaaaccatttataaatggattagtttggattgagttttattctttttcttgaaaaattgacttaaatcaatccgttcaaatttaattaaattgaataacaaatttcgtcaaactcaacccaaaccaacccgtatacaccctaaggggagggttggttaagtttaatttaaatatttcttttaatttataattttaaccatttatatcactttcactcataaaaaaaacatttaatccacatgcgtatcccatcccatttattttaacgatgtcctttgttaagcataatttactatctgtatttaaacattctttgatgtttggaaacttaaaaagttaaaataaaactataaacaattaacaaagattggtctaattgataagaaataatttcatatcacaaaaagacgtgtggatttgattttcattcttcgtataaaaatcttgttgttgatgaataatttgtaaataactctataaatgttcttaggacttatttaacattaatgagaaatccaacttacctaaacttttcaatagaaaaaaaaacacttcagataataaaactatatttatctttataaatacttttgcactttttttacaggaaaaaaaatacttttgcacttgtcaattaattatttaaaaacttaaatattaataccttatgatgtttattgtaaagtaataatctcctcaggagtctcaatccagcaatgataaagctaggttgggaaaatgccaatacttggcagttatggttccattaggtcaaattaactgctcaatattttcttaattgtaattaattttcatttgtttctatagattctcaaattaagagtattgctacttcataaaatagaaaataaaaaatcgatataattttttttactggaaaaatcgatttaattcaaattataaaatattggtttaacttaaattaaatttaatatttttcaaccgaattaaacttaaataaagtttttgatgattaatttaaataattttttacctcgcagttgcttaagacttgaacttcccctcccaccgagccgaaagatgtttggagcatggactttgaccacatcgaaatggctgaattacggttgcaatgataaagaaactatgtgattgccaaaataaaaaatatataaagaaattcttcttcttttaatcaatttttataatatagagataaataatacattttagaacaaaaagattttgggattatgatttttttaatatgattatcatacagtatcttagaatttgaatgtattggacaaaaaatgtgaaatgtctcctttttttttatatttcttcaagtgttctaatttatagttccttgggagcagaaaattgttaatcatgcatgtcttggtcatataaggcttgcattaaatgtttggaaacgtttagacacatccttttatattagcaagttgttttttttttttttttttaataacaaacaacttttttccctttattcttgcattcatagcattgcaatgttccctaaaaaaaggataaatactatatgtttttcatcctttcaaagtagtagaagttcaattttcatttttttaaaatatattgtcttattttagttcctaaaaatttaaaacgtattaatttttgttcaaacatctaatattagtggattgttgttgtgactaataaagttccatattaatattgtattagaacatttttaataagaatttatagaagaatcttttaagtaaaaaatttgtttcttattatagtttcttttcattggaacaattttactcaataagaagagtttatataaaataagatttgtatcttatgcaagaaattatttcttaataataaaaataatatttatctacacataacaatactataattaaattataattaagtggaaaaaatataaaaatgtgaattttttgaaaatttttaaaatttcttaccattaaaataaatttgtatatgaatttcttaagatgacatgacattataataaaaacaaaaaaaaatactataaaaatcataaaaaataacttaaaaaactcacttaaatttttttcatcaaaaatgtcgtcagtgaacattttgaatgaatatctgtcatgtgtcattcacttcggtacatgattatcacatatgacaagataattttttttctcccttaaaaaattaaatttgattttaattactataaaatttataagtttgggtttttgtcctcataaaatattatatttttattttataagtttgatttttagtcctcataaaatattgtatttttattttaatataatatattatattaagaaaaaaacaacataatattcataactttgttaggaatgaccatggatgggttgcgacagatatatttttgattctacgcatctcaaaactttgttaaggttatttatgtaagtttaaacccctcgattaaaacccaataatagatgggacaagatggacgaggtcaacttgatttattaatgtaatatattactttttcaattcttagttataaaatcattttaattaatttatattttttaagaaaatgattaatttaattaattacattaaatctggtaattcattacagtatcattataaaattataattttcttatctctaattatttaattattttcattaatattttaagagagaataattaaggatatgtaaaaaaaattaatgaatctaaaaattagaaaatagttttataaaaaaagacaaataaatttctgaaaagtatcttataattagaaatgaaggaagtaatattaacattattaactattagaagaaaatggatacttcgtatttaactatttttctatgttttttaaaataaaaagaaagataataaaaattaatggatgatttgtgaaaatagttataggaataaaataataatttatgaatgttagtgataaagatataatacaattatatagattaacgaaagatttgtgtagaaaaaaagttgttattaatttgttggctcaactgctcaagagctagttttgggtcaaaattgcttccagtgccgctgtcaccgtaactcttcttttaggataaaaaaaaaaattattgagttatgaatattatgttattttttaatattacttaatatattatattaaaaataaaaatataatattttacatttttatgagcattaaaatcaactttttaatttttatgaggacctaaaattaagcttttgaattttatgatgaccaaaattaaacgttatattttgtagaaactaaaatcaatttttaaatttaggacaaatatgatatttttctcataaaattaaaaaatattcgaatttcgttcctctaaaatttttagtaagttttttttctttacaaaattaaaatatgttaaatttggactagagctaggttgagatatattcaattaaaatattaaataaaaaatcaacagcataagtctttatgtatttagccataaggataacaaagatacgtgaatcatgaatagatgcaaacctatgtagtgcgtttaacacttccaaattaaattaacagatccaattattctaatgttgaattctgatggtcaattctacatagatcaaataccgtgcttttctttcaattgaagataaacgttggatgcaatgcaatgcaatacgacgctcgatggagttgtgaaaattgaaaaaagaaaacaaaatgttatctagtctcatcatttcgagctatgttgctcatttcttaattattacacatttgaaaattacaaccaaaggagtctaattggttatacaaaatatatgaattgttataaattctcagtatctttgattcttatgaatttttttataatttttgtgaatgatttactctgttttaattcttatccacacaaatgtaaatcacaaaaataaatttttagttacttttaaattgtaagaaagtagaagttatactactataacaggagacttgatttaattttaaatattctcaatctaaatttttggagtttttctttcttcttttttaaccctgggaaggcaagcgatatcaagatatggccacaacgcaaccaatccgaattctataattaatgtttgaatacacatttcccacatccaactttgagctttttccttagcgtctcaaacgcacgtttcccacgcgataggattgcaaacccccttcttccttgtaactttttttggtttatgcttgaagtaataaaattgggtaagatggtttgtgcttaaagctagtagtaaaattgatttgggtggtctacccttaaagtaataaaattgggtggggggtaaattacatttaaaactattagcagaaactcaccagaaaattattactatataagtctaaaccacaaacaatttaattgattcattcaagactattcaactacttctacattaagagatctgttttaggaaggttgttaatcaagatataagaggcattaacccctcatcagaaggatcagaattaactctggatcctttaccaagttgtcttccatcaagttgcaactgagcattttacagatattttcacaacaaaaaaaaaaataatgcaatgcacaatataaatactcatattgggtttggcatagttttttgttttttttgtcacatgctcccaaccagagtacaaaagctactaacatcaccacttatgcaacccagtgtctatcctcatctgatagcatataatagtctctgactcactccctatcattttcttccagcttgaaccaccaaagagtgaaaacactttcatggagaccaacttagattattccaagatgctctttttactcctccttggttccacttcattgattttcctctcacacttggcttctgcagccactcccaagctcaacactcaagagtgtaaaactcattccttcactcattgctgttcacacactttttatacttgtatcaaatcagttcatacttcataacattagtttataatcctttctgctttcccatgttttggatcggaacatagagttgcaaaagtgaggtagagtagtcaaaagtggttttgtctctctcatttcttttgtttggatctatggacagcaaaagaaaatcatagattggttgtttcatttcatcatagcttctaattctataattctatgcatatgcatctgtggtaccgtaagactcatttgaatgttgtttgctttttctctgatcgatgaagttgagttggttgaattgtgtgcagtgaaggcattgaaggaaataggaagcaagattgggaagaaagactgggactttggggtggatccttgcagtggaaaagggaattggaatgtgtctaatgctaggaaaggctttgagagttctgtgatatgtgattgttccttcaatcacaattcttcttgccatgttgtaagcatgtaatgctctttctctctctcttaatttgtttcaatcaagtttttggtattctttgtgttttcgagaactcagattatggacgataatcacatggaatcacatgtgcacttaggaaaatgaagatgattttcttcaagttttgattaattaattaatcttcacggccatattgcttcaactattttttatttattactacagacagcacctaaagttaccatcaaaccttcacgtgcaattacatattttttttaagagaaaaaaattgttcagttataaattcgtgttttcatagctggattccaagaacctttttaattgaagctaaaaggaagaaaagggtaatgggtgtttttctactaattttctttttacctagaatatttccaaagatttatgcatatcctgcattcttcaaaaaattgaccatcgcgaatcttaatcatgcacatttgtggttgtgactcgtcaaagtaacgcgtagcactaaatgagaagaggaaaatgtttctttttttttttttggtgaagagaggaaaatgtttcttggactatatttttaaaataaatgtataccagaaaaataaaaaataaaaataagtgacaattttttttttttgagagagacaaaattaattatatacttatcatgtataatgttgatttcattatgtttaagtaccagaactcattaacatacaaaaaattaagtttgaaatgtcggacacgggtctcaatcgacaactcaaccgacctgatgcaagttgcaaatcgttgactttgaaaaggatgtgctgtctttatctttttttctcgtcaaaattttcttaaattttttaattttcatctgttgggctatacgttcatgtttttgcttcaaactatttttttttttttttgttacgtcgaactttgtctagtaaaaagtaatttgttgatttttttaaataggaaatgttgattaatttatgttcaaagaatgggaaagggtttactgaacactagatcaactgttgagtgttgatggttaccacagaaggggtactaatcactagtctcagagacaggtcaatgaccaaaaatatgtagtattatttttcatagataacacaattagtttttagataattattacgaaagtcagcaattttgacattcataacaattcatgattgtttgatactgtaagatactttaatattgtcaatcaaggtcgaagatcgtggatagtacaaggaaattaaaatattaccttaggtcttttaattttattttacttattattatgtaagtttttatataaatctgtttttattgttcaaattacaatgaacaatgatgttttataaaaagttagttagctacttgtcttaagtaacaattagaggtgaaaaaaaaaaatcaaaattatatatataattaaaaattgaatttgtagtttattataagcaattataccattaattaggaacatggttattaatgttagagatagaaaaatttaatagcattaagggctaaagatattaatgcatgattatcaatttctttaattaaaaataacatttattcaacattctcattgtttctttatctctttttcatattttttaataccttaattgatatcagatttttttttataaaaaaattgtttatattatttagtactttttattcttatattttgtagtaatagaaaaaaatcaaatagaaagtagtaacttggttttcaaaagttaaaataaaaataagttaaaaaaaatctcaatatataatactcttataaatgtcttactattcataaaaagaatatataaacatgagtttaattggtaaaaaaaagtcacaaaaaactaaaaaaattattttaagaaataatttatataatattaagtttctttaaaaatttgactaatgccctaaaatcctaaacacggtcctgctgtcaatacattctaattaaattcttgaattaattctaaattctactttggttaattttttagatttaatctttttgtgaggacttcctaacttttgtacacaagggactcacaagattgtttcttttctcatttcatgtactgtatttgtttattgattggatatcttggaataatcatgttaaccaccatataattataaattctgaatttctgctttttatttcatattctaaatgaacagattcttgaaggctcagaatctgtctggtattctctcaccagagttttccaagcttcatcatctccaagaattgtaagatatcaaatctcagttttgaaaccatgacttttttttgctctgcatgatgttccctatggaatggtgaagtccactaactttgtcttgcactttcaaacagagaccttagtcgtaacatcatcactggttctatacctccacaatggggtaccatgcgcttggttgatctgtaagaactttctgctttgcaccctttggtttctctgcattgtctcttcaatttcttctgtatacagtaaacaacttgagagtgacactaaagattcttgtgaattgaatgtgcagctcttttatgggaaacaaattgtcagggccattccccaaagttctcaccaatatcacaaccctcagaaacttgtatgttgaaatcatttctttattttcaaatgaattgtatgtttactccatcacttagcttagtgataaattggatgtatttttaaagaaaaatagaaagtaaaaaaaagaagtgaaagatatatttggaatatctaaaggtagcttttaccttttgccaatatatttgcttttacctaaaggaagcttggcataggtgatccaggattgttggtttagtataatttccaatttatttctgcagctttgtttaaattaaatatttgtatgaatgttacaggagtattgaaggaaatcaattttcagggcacattccaacagagattgggaagttgaccaatttagaaaaactgtaattcttttgatcttctttgtgtgcttattggaaatttggaatctcaatatctgcttctattttccccctcacatattattctgtagtgttttaacatgagtaaatcatgtttgtttagcattctgtcatccaatggattcacaggagcattgccacccgtgctttccaagttaaccaagttgattgatttgtaagttcttatcaatttaacatattctagcacatggttacaatctgacagttaaagatacacaaagatgagccactttgattctatttaatattaggtagtgaggtgttaatgcaagtcactgcaggtttcttaatcaattcatataaggagctacaaaattaaagaatctgtagctttgtttatcacttttgttcttttattgttgttacatttaaattttgacatttccttgcatactgattaacctttgggaaacacattttaggaggataagtgacaataatttccttgggaagattcctgatttcattagtaactggacattgattgaaaagctgtaagtttcctacctcgttcattcttgttgtatttgttgtatagactactttatcatgttaacttttttcttttggggttacaggcatatgcacggttgctctcttgaaggtcccataccttctagcatttctgccttgacaagattaagtgatttgtatgtttgtaattctttattttatttatgttttggtcatagaagatgaatatgttaagtgattgttttatttattctttgatacttaggaggataactgacctaaaagctagtaaaagctcagctttcccaccactaaataacttgaaatccatgaagacactgtaagttcaatgacttaaatgcttctttctcttgaagtctttataaaattgacctatattttatttggacatcataatgcagggtattgagaaaatgcatgattaaaggagaaatcccagaatatattgggagaatggaaaaactgaaaattttgtaagttgttcaacaagtaacttacaacagttttgacaacatgatatattactttgaggatcattttccacttgagaagatctcatagaatcaattcaaagttggctaagccttcttttcatataaattataatattgacactacgctcataataatgttctataattttatctagatctgaaatataatttttttccaggtacaaggttttgtaggtcagttatggtattattttgtttatagccgtgaaacatgggtaattactaactagcactaaacttcattaagagagaagcaaaaatgaaacagatatgtctatagtctttccggtgtagattgatttttcaaagttgaatggttgttgctctgatgattcatgtgtcccttatgaacttctatcatagaccttgctttacatgaacaccatatcactttgtttgaataatactgaaggaagattataaagacagctataaaatgtagaacatgctcatcttaaagttgaagataaaatacattttttataatataaaattattaaccctttcgttacataaaacaagttcatttatttatcttcgttgctgtagagatttgagttacaatggcttgagtggagagatacctgaatcttttgcccaacttgacaaagtagacttcatgtaagtggatgcgttgaataaaatatgttattgatacatttcatttttaattttgacgaaacaaaatgtattaaataatgcaggtatcttaccgggaacaaattatcagggaaatacctcgatgggtcctcgcaaataacaaaaatatgtacgttaaatacttgaattgttatgtttcaattttcagtcttcatcttaatatttgcttcagtggctacagcgaataaggcagtgaaatatatgacaaaaaatataatataatataataacaatagagtttaaaaaataattttcaataatattaaattttacaattttaaaagttgtatataatgaatatttaaaaaaaaaaaaaaaaaaagaccgggtcatgtgagttaattcatgactcacttatttaatcattgatccaatatcttgactggatcgatcaccggtttggtctttaaaattatgctctctgggatcttcaagccgttgatgtctgcatctgaaattaaataagcactcctttagcaacatgagattaacatcttttattatatattttggtgcacagtgatatctctgacaataaattctcctgggacagctcaagtccaactgaatgtcaacgcgggagcatgtaaagttttagtttatttaagctttgagtaaaagttgtcttcaattagttatcagttatcactgcaacatttttttttttttttccagaaaccttgttgagagctactcttcatctgtaaatacacagtaagctgttgtctttggaatattttctgtaaaatttggttattggtagtagccctagaatataaccttaaatttctctcttggttgcagaaataagattcattcatgcttaaaaaggaactttccatgccctgcttcagttagccaatgtaagtatgtgaccatactacaacttttaaattacttttatgatctgatgggctggtttaaatattgactcaaattctgtgacctgaaattgagtgaaataagttgatgagaaactttcaactcaacatgatttcataccaaaagaaaaatttaagatagtcatataacatgattttgcttatgattctatttacgcaaaagttcactgcctacttctttgctaacaatcttaagcccagagttgtacagaaattcaaataaaacaaaataatgtaagaaggaataaatgtccattaggagagaaacaagaatataactgtttttcttaaggggttaagactaatttcctccttttctaattatttgaaataaataggttgactaattctaagaaacttaaactggaagataatttgatatccttttttattaccaccattgaatgattgtaatgacattttattcttttttattacaaccattgaatatgttacattctttgcgaattttacctttctatgcagttgtctatttttaccattagaccattacaatttgaaagattttacactgagtattctttcttttcaaccctgtttgtcattgttttttcaatagatcagtactccctgaacattaattgtggtggaaacgaagcaaatattagtggtaatatttatgaagctgacagagaacaaaagggtgctgcaatgttatattacactagccaggattgggctcttagtagcactggaaacttcatggacaatgatattgactctgatccatatattgtggccaatacttctagacttaatgtctctgcactcaattcacaactatacacaacagcacgtgtttctccccttgctctcacatactatggcctctgcctaataaatggaaattacacagttaagcttcactttgcagagattattttcatcaatgataggtcccttaacagtcttggaaggcgagtatttgatgtctatatccaggtaacaattacttgcttgatttgcaaatgatgctaaataattgatttgcaaatgatgctaaataattgatttggactgagttgtgcattgatgtatatggaatatattattatgtcctaaaattaaggggaatttagtgctgaaagactttgatatccgaagagaagctggtggtactggcaagtcaattgagaagacatttaatgcttctgtcacccaacatactttgaagattcacttctactgggctggaaaaggaaccactggcatacccacaagaggagtttatggacctctagtatctgctatttcagtaaaccctagtaagtcacatatcatgcatcttagagttagtgctttatatgacttgataagactgcagttgaaaccataatccattatgaatttaaaaattgtaggaaaagggaaagattaccactaatgtctacctctacaagacctccactagagttctgttatcaataaaattcatcattctttccttttatctgatccagttctatcagttttgttcttcatttatgcaaaagctaaaagtaaatatttttcccttgcacagattttaaacctccatcaggggatggcaaaagaacttatgtcatactggccattggcatagtagctggtgttttagtggttgttcttctggtgctggttctcatgaggaggatgggatggttaggaggcaaagatccagtgtataaaggtatggaatatgccaccaagttcttccaattcttttagttagaacaaatatttccatttgtttccaacacaacatcttttctgtatccagcagtatttgcctgagcttattccagaatttgtttaaataaatatttctacaaactttattcaaatgtcataaaactgaagtgcaacaatttacttctatataagatttgtaattgatgatatttctccatttcaccaaagtcaaggctttaagagaacatacgagagtatacttgcctgccctatgtattaatatgctagatagaaatgaaatgaactatgtgacagatattgtagagaaagttataaactttcttgttgaatccaaattaccaatattttgtttttattttcagagctcaggggcatagatctgcagacgggattatttacactaagacaaatcaaagcagcaaccaaaaactttgatgcagtgaataaaattggcgaaggtggctttggttgtgtatacaaggtacttttatcttccattcttggttacctattccatcttatggttaatttatttgttacttgatttgaaatagaagacacacttcatggtctctatatctccattcaattctaatttaacgcttacaatttaatcataatttctgtaatgtattttgtactcattagcaagcatgtataaccttcgtgggttaatgaaagagaaaaattatccacgtacatgatggttaaagtgtaatggagatttgttagatcaatcagcacttcagtagtttgaatatgtgtacctgtgtaatgctaatgcaagaaaaaaaatacaccttgttcatgatgcagggcctactatcagatggtacaataatagcagtaaagcagctttcttcaaaatctaaacaaggaaatcgtgagtttgtgaatgagatgggactgatatctggacttcagcatcccaatcttgttaagctttatggatgttgtgtggagggcaaccagctaatactgatatatgagtacatggaaaacaattgtctatctcgcattctttttggtaagcttcttgatgaataaactttagccatacttgccatttgaatcaaacatttgatataactaactaactgattgtccttctcccaatcacatacagggagggatccaaacaaaacaaaactagattggccaacaaggaagaaaatttgtcttggtatagctaaagctttggcttatcttcatgaagagtccagaataaaaatcatacatagggatattaaggcaagtaatgtattgctcgacaaggattttaatgctaaagtctcagattttggtttggcaaaacttattgaagatgacaaaacccacattagcactcgagttgcaggaacaatgtaagttcatattttgctactatttctcttgttttcatatcaaaccatggtaaaaatacccatttttaatcaatagtggagattctggtaaaaatcaaatgcatgtgtatcatactatgaagttagttataatttcaagcattaaatatttaacccatggttattgatgtactttattctgtaaagtatactcttagtcaaatccattattttaacaatgctaaatgctttttttttttcattttgcagtggttacatggctcctgagtatgcaatgcgtggctatttaactgacaaagcagatatttatagctttggtgtggttgcactggaaactgtcagtggaaagagcaatacaaatttcaggccaaacgaggattttgtttatcttcttgattgggtaattagaatttatcttaatgcataatataacaggctcaaacaaacaatagatactaaattaccaagacctatggattattgattttactagttcgtacatacacacatgcatatacgggcatatcaagtgagagggattttttgaaaagattaaatcacaaagttgtcatttttcagtgatcatgtaatcattaaatcacttttttttaacatcaaatgctagtttttagttttttatcggcaaatgttaaatcacttttaatcttaacgtatagttatttgtctagaattgctcatatatatatatatatatatatatatattgtaattctttttttagagttttagtatcaatttggtctaaaatttggtctaaaatttgagtttcattaggcatatgttttgcaagagagagggagtcttctggagctgattgatccaaatttgggttcagaatattcaactgaggaggccatggtggtgctaaatgtggctctcttatgtactaatgcatctcctacacttagaccaacaatgtcccaagttgtgagcatgcttgaaggttggactgatattcaagatctactttcggatccgggatattcagctattagttcaagttccaaacataagagtataagaagtcacttctggcagaatccaagcggaacacagagcatatcaatacctagtatttatactgattcctctggctcacatgttgaaacagaaaagagctatcatcctgtaaccgttaattcagatggatcagacaactgaaattcgtttcttaatgccacatatttaatacaaaactcgtggtgtattcaatgcaagaaaagagaaaaacaaaattaaaattaataacaatgtaaagagttttatcttgtcgctagttcgcacaaaatttggggtgtcataattagggatgacaataggtaggtctaggtaaggtactatagtatatgtttctatacttgcatttaaaaataatacccgtacctggtcccataccctttcaggtaataattttaatcttattttcgtacacgtttgatacctatatgcccatacccgcacctgtgactcgcacattacttatgtataaggttaataataataaattgataaaaataatttaattaaaacaagcaaacataacattaattcgtccaaactcaagtcataaataaaaaaaataaaaaataacatacaacatagtgattgctaaagctaatattttaatcgctaaacaaaaactctaattaaaggtttagtatttttcactctctaacagtgatatggttagagattaaagacttagagttttatcataaaaatataattatttttcacaaaatattatatatatatatatatatatacaatatccgtgtaaatttgtgcatatacttgtccggtacttagtcctattattatgggtaattatttatcccgcttgcaaatatttttgcgatattcataaaacccatatatactttgtaattcctaatcatagtttggagctatggttatggaactattcccatcacaatggggtgccttaatttagggttattcagtaatcttatttttgccttaaaaaaaagattagttataatttacgttgacatgtgaggattgctaacaaagtctctattgcttaaatttatctaaagctgcaaaatcatgtgtaaaagtcattaaataaagtgagacgtacaaaattttatgattttaaataaatattaattaatgataaaaaaagtgttcaataaagtatgttaacgaatatattactaacatttcttttgatatattgttaaaatgtttttaataaaatatttaaaaaaaatagattattagccgcgtagtccaaatgaaatattgagaggaaaaaaaaggctaattgaatttcagcatattttctttattagtgcacccaactataggggggagggggaagaaataatttgtactggtacacagaaaactctcttatttctttaacacaaacattttgctaatcaattgtacattttactgctcccatgagatatgtaaactatgcttatctatttattattcccttgtaacaattaacaaataatttgaaagtagaagtactgaaacgtgacttgcacataaaggcttaacaaatcacaccagcatcgttcttctggtaggtgatggatgtgacaccagtagcattatttatgccgacatgtcatcctgatcatagcaaagttaactttggattataaaaagccatcaacaaagaattatttacgttcgtgagaattatatatcaccttttggtcatcttcttcatataactaaattgagcctgtaagctataccccggatccggcaagccgccgctttgaggcatttgatatggccacctcaccaagcttgtcagcatcacttgatgtagtcctgacattgactggtgtataatgccgtaaccattccccaacgtaaacctgaagcataaaatagatatgatgaaactaggcaagagattgaaataagaaaggcgtcacatgttgttaggatccaattgcaaggtattgggtcttaagtcctacattggaaatatggggttctagttctagtgtaggatttataaggtcttttactctccaatttcaatgactaacttttgtggtgtgattctctcaaacttcttatcgattggtatcagagggtttcaccatgttctcaactgcaaacgagcactggagatcgtgatgccaacattgcagtgttcacctagaactaatcaaattatcaaagtgctgcaaagtgtgatgagatgtttggattcaattgcaagataagggacttgaatcccacattggaagtatgggattctggtatagttataaggccctgtctccaactacaactgctaatttttatcatgtggttctcccaagtttcttatcatgttgtatatctttaggtagaattgaagagtgtggtagttataggtggctctaaaagtttaccatacagttctaatgcattacgcaaatattgcctagtaccactgttaagaaatataatgcagccatgatacaacttgaaaaccattttccagtaaaacaagtgatacacaacaagtacagctacattagcacaatacagtaagcatgatatatttttaatatgcaagaaaatcataacaagaaaaatgatttaaagaaagaaattaacctgttgaggtctcaaaatctttgtatcaggatcatccaaggactctctccaatgagccaagtacccagccattcgagggatagcaaataaaacagtgaaatactcaggtggaaatcccatggccctgattgcataaaactattagttcaagccttgtatggtattctttttttttgggggggggggggggggggggggggagagggggcatatttttatcctccaagttagaataactgggtgaaataatggattacctataaattaatccagagtagaagtcaacatttggatatagcttcctcttgatgaaatattcatcagatagtgcaaccttctccaaggcaactgccacctgaacgatcaaataattacatacagaagttagaacttttgaagtccatatactgaccaatctacataaattacataggtactttcctggtcagggaaaaatagtgccagaaaccctagtaatactttaaatttgaaaaatgaaaggtgttgctagagatttttaatgtcttaagatcttcatttgacttgatctgctattttttttccaaaccaaacaagacatctaatgattatgcatgtagacacaatggtgccaaacttgtatgcacaaacatatacaatatacacactaagcatactattctgtaatcaaaattaaaaatacaaaaatacatttaaataaaacaataggaaattttttaaatgtagtagtttttctctgtattcacagccctgatcataggcctcgtgaccagcataccaagatcaaggaatatataacagacaatagacacaggaaatacggaatggataaacacctcaataagaggatcccggcccacaatggaaaacacttcctctgccagttttcttaagacctttgccctgggatcatagtttttgtacactcgatgtccaaaaccagagagcttgcgtttcctggaggaaaaatgcaggacaaaaatatcaactaaaactatcattttctctgcttgctgaaaagagcaggtatcatgctatcctttcagggtataagcaatgctaacaactaaggaaagagtaaaaaatagataacagaagaaagtaatactgtaatagccacctggctttgacaccttcaatgaactctggaatgttctgaacagttccaatttcactcagcattttgaggacagcctgcagaattgaaggtcacattaacatgttcccatattaaataacagtatagtgtttgtgtttattcactacgttcacctagcaatacataaaagatcatgactgcttcattaaccacttatagctacctcattagctccaccatgaagtggtccatatagagctccaacagccccggcaatagcagtgtatacatcaacgccactgaaataagaataagatatatagtttagcaatatgacggttttatatttgctttatattgcttaagtagtattgcagtaagatgtctaccttgatgcaaggtgtcggacagcagatgtagaacaattcatttcatgttctgcgtgcaggatgaagataatgtccagcgcacgagttagcctaggattgggtttatatgaccgattaccgctgaaagtatgcacagtggagattgtgttaatagttaaaactctaaaaaacagctagtatgtggctaccattctatcacttaagattgaattatacctctttttaaaaacaaaaatggatttgttatatatgagcaaaactcaaactaccattagtctataaagcaaagttaaatataaaaaagcaaggttgtcttaattcaaattaacgatcaagcacaaaaataccatacatacaaagaatctagcatgtataggaagttctctgtgtaagaaaggtggttggatggaagcacaggtggccttcctgccattctaagataaactgcagcagcaattgttgttatctgcagtaaataaaaaggggtgaaaatatgatatggcaataaagcagtaggacacataacaaataatcatagggttgcgaggatagtggacaaaatcccacaagatacaatcagtaaaaccagggctagaatcattcaaataactaaataatttgcatgttttcagagatagaacagtgaaaggagaagaaagaaccaaataagcacacctttccaataactcgtgttatctgtttgtctcttatttgctttgagtcataaatatcaagaccctgcattaattataaaaaaaaaaataatgaaaaaggatcaaatctggataaaggaatatacagagcaataacaataaacaatgttgaatcctaattagagaaagagtatcattcacaagtacattgtagtaacccacaggaaaaagtagcatccaaaaggaatcccaagattagttttattatatctcagtatctcaaatctctaatatgccccctcattcactccagagtcctttggactcgaagcatagacaatgtacaaatttgtattgaaattcaacttattaacaaaaaatgacttgacagcagtttttgttacttactctgagagcgggatttgcatcagggtgaaaaacagaaagagcactcatggcattaacaagcacacccatgggatgtgcatcatggggcatagattgtatgatatcctacaaaataaacgtaagatgataccactacttagttagattaataatcccaaactccattgaaagaaacaaacaacataatctttctattttattttatatgatcacttcaagagctactagatttctttaacaatataaaataccactggcatactaaatttcaagaagtaaaacaattagtggaagttgttcatattttacaaatctaaaagctgtcactgactgaaacaaaaaaaagttatcatttagcggatgggatttggagaacataaaaacacaataagagttggtttagataaagcataaaatctcaccaaaactccttgtggaacagccgaatgctgagatatagcaaactcccattctgctaactgactttcagaaggcaaacttccatacacttgaaaacagaaaaaaagatgcacgttaataaatttcagaagaattcatgctacatacatatcgaagcacataattaacaagaagcagaactaagcccaaaattcaagtgtcttcaataacataaaatctgtttaagtgaatcctcagtcaaaatgttttatctactcatacacaagcgccacagaagcctcatacacacatttgcagtgaaacagaacactcacttatgagataggacacttccgtgaaagtgcttttctctgccaactcctcaatagggtagcctctatatctaagaatcccctcatcgccatcaatataactaattgatgatcgaacaggagccgtgttcaaatagccaggatcataaagcttgagtcccttgtcattcttcccagtcgatatctgcaaatccaaaaaaacccataacataacaataactaaactaataagagtaaatagtgtatatattactttcattcaatcacagactacttgtatgttaagtttgttgacttttatgctaagatggtttcttattggttggtagtgtaaatttacactgagcatgcataaaaactaaactcaatgttaagtaagcacaaacagtcatactataatcacaaaccatcccacctaagatttcaccatgcaactaggaataggaaaaaagcccactttgcaaacaattcaacaaagatgaaaggagcagaattggtggagacccagtttgcaatattggaaattccttggaaagcaaagatcgaaattgaaaatttcatggatgaggaggaaatttaccttcttgaggtcagaagctttgacagtgccttcattggagacctgaagctggtacttcttgccggttctgtcgtcgacgacggtcaaagttccgtggaggttcgtcggcggcaactgagcggagagagggagagggcggagggcgtcgtgatcagtgagttcagaggggaggaggtgagcagcgagcatggccaaacggccacgagcatgcagcgtcgctgctgctgcatctgaattgcttgacatgttctctcttcagaacacaacaactattggaattcagagagaaaaacggaggatttggagttggaggaattctgaagctaaaagagacgtatacgctcttaactaataataacggataatcttgtctacgagtttagacttccgagaaaaatattaaaaaattaagaaacttgttattgcaattttttacagtatgtaacaagcgcggagtagttatcatttattaatcttcgtagaggacctaattaaccatgaactattaatggtatggtatatgctcaatttagtccctaaaatatatatttgttgacaattttacttttatattatgaaaatcatttatttagttcacaaatgtaaaatgttacaataatttggtctaatcgttaaaattatttcatattcattattggagatagtctacatgactcactcattcacataatgacttttcacattatttttgactaaattatcacattttttttaaatattgatttttgaaacaaaaagtaaaatttcattctaaaattttttcaccaaaacatatatacttactaacaacaaattaatccctaataaatattatgaactgataaactagtcccaaaaaagttataacatacacttagtaatataatcatccataaaataagataacatacacgtaattacgaagctaaatcgagcatttataaaatataaaattgttattcattaaacataaaatatcgaagttcccaagtagcagtaaaacttcaaccaaagcatgccacaatgtcaatgtcataatagaaatttccaaaaatatatccaaaatacatctaaaacacgttaatgcctaacttttcaaaatatatccaaaatatgtttaaaacacgttgaatccttttgaagggagttgaggtagttagatatgtggtataggatgaagctcatcaagcttgattgtggcactcttggagatacttcaacttggaaatgaaactctaagcatatgagtatttgcagatcggataggaagtggtctaagtgcatgtgtaagtggtacaaatgttgtgacattaggagctgttggtggtgtaacttcaattgcaaattttgagaacaaaccatttcttcatgcattgaatgaatgaaattaaaataagttattatattgatgattgagagtaaatggtttctaaataaataaaaaaatagataacaaaaaatatgagtatactgttatttgagttgttccagcgtaataacagcaactacaagtaagtgtttccattttttaggttgcagcatctcatacaagtaagagtgggaaaattctttgtaattgacatgatatttaaaagttaatttacagtttatttaattaacttgtaacattgtttaacaagagtaaaagtataggataaactaaatttataaagaatagttagtcttatatttatttgttagcgttaaaattatgggttgaattgtcttagatctaatgatctgaaaaatatatgttcatcttaaaaaaatataaaacctcatttatcagtttttaattaagcttataaagtatgaatggcgcagctaggtaagttgcgcgtggcatgaattgaagagtgcgggaagagaaagtgaaaggaagatgagggtggcggaggaggagaaagcagtgttggagcaagtgttcgggtcgtcatcatcagaagaatctgattctgatggctacagcgagagcggagtgggaggccatcacagaagtgaatggcctatggctgtgccgtcacttcctctctccacgccgccagtctcacatactctcctccatccaagccgccaattggttcccctccccttccatcaaccaggccatgcgcttcggcctacaacacctcccttcttgggccacccctctggcccactccatacgccgctccgtccaagcccaagcccagtcccagtcccaggcccccttccccctccacctcctccacagagaacctctcttcgaccagatgatcgccaacgtctaccagcccggcgaaggaatctgcgcccacgtcgacctcctccgcttcgacgacggcatcgccatcctctctttagaatcttcctgcgtcatgcacttcactcccctctctggttccctttccgttcccgttttgctcccccctggttccttgattctcatgtccggagaagcacgctaccgttggaaacacgaaattaatcgcgcaccgggtttcagatatggcacggtcaaccattgactcaatccaaacgcacctctatcaccctcaggaaactttgcccctcctctccctgattccacactcaaccctttctttctgttataataatttcaatgttctattatcagcattcactaaacaaatttcattaataattgtagtaataacagtaacacgtatcttatctatctatctatgttattcggcgttgtttgatttgctactgaacgcgatgaaattcagctgatatcgtctgataaaatcatcgtgttatgcataactcatattttatgggcgaatggtgtgcaatgcaaccaaatgaaagtgtcatgtgaatgtgacgattaataccgagcaaatcaaattatttatgatttatcacttacattgatactggcgcgttgtaggatgaggacgagttcttctggagtgagaaaaccgaaccattgatgtgtgcctctcggaagctgccaagttcaaattatttatgtcatatatactggccatcggcatagtagctggtgtttagtggttgttcttctggtgatggttctcatgagcaggatgggatggttaggaggcaaagatccagtgtataatggtatggaatatgccaccaagttcttccaattcttttagttagaacaaatatttccatttgtttccaacacacatcttttctgtatccagcactatttgcctgagcttcttccacaatttgtttaaataaatatttctacaaactttattcaaatgtcataaaactgaagtgcaacaatttacttctatataagatttgtaattgatgatatttctccatttcatcaaagtcaaggcttattaagagaacatacgagactatacttgcctgccctatatatttatatgctagatagaaatgaaatgaaccatgtggcagatattgtagagaaattattaactttcttgttgaatccaaatttccaatattttgtttttttattttcagagctcaggcaaagatctgtagacgggattatttacacttagacaaataaagcagcaaccaaaaaatttgatgctgtgaataaagttggcgaaggtggctttggttgtgtatacaaggtattttgatcttccattcttggttacctattccatcttatggttaatttgtttgttactggatttgaaatagaagacacacttcatggtctctatatctccattcaattctaatttaacgcttacaatttaatcataatttctgtaatgtattttgtactcattagcaagcatatataaccttcgtgggttaatgaaagagaaaaattatccacgtacatgatggttaaagtgtaatggagatttgttagaccaatcagcacttcagtagtttgaatatgtgtaactgtgtaattctaatgcaagaaaaaaaaatacaccttgttcaagatgcagggcctactatcagatggtacaatgatggcagtaaagcagctttcttcaaaatctaaacaaggaaatcgtgagtttgtgaatgagatgggactgatatctggacttcaacatcccaatcttgttaagctttatggatgttgtgtggagggaaaccagctaatactgatatagtgatatatgagtacatggaaaacaattgtctatctcgcattctttttggtaagcttcatgatgagtaaactttagccatacttgccatttgaatcaaacatttgatataaccaactaactgattgtccttctcccaatcaaatacagggaggacccaaacacaacaaaactagatggccaacaaggaagaaaatttgtcttggtatagctaaagctttggcttatcttcattaagagtccagaaaaaaaaatcacacatgggatataaaggcaagtaatgtattcttggaccttcttatcttcattaagagtccagaataaaaaatcacacatagggatataaaggcaagtaatgtattcttggaccttctctgctaccacgacggcatcgccatcctctcctttgaatctgactgtgtcatgcacttcactcccctctccatttccctgtccgtcccattttgctcacccctggttccttgattctcatgtccggtaccggagtttcagatatggcacggtcaaccattgactcaatcagcaccctcaggaaactttgcccctcctctcctgattccacacttaacctttatttctttctgttataactttaatgtttattattcagcattcaaaacaaatttcaatattcaatactaataataattatagtaataacgtaacatggatcttatttatttatctatctatgctattcggtgttgttttatttggtaccgaacacaatgaaatttacgttgatatcttctgataaagaccaccgtcctgtcaccgggttatagacgaatccggccatctcctccacctgtgtgtgcaatgcaaccagaataaagtgtcacgtgaatacgatgattaatctctaacaattgaaattatgaatgcgttttgcgtatatacattgataccggcacgttggaggatgaggacaagttcctctggagtgagaaaactggaccattgatgtgtgcctctcggaagctgtggagttcaatatatgtataatttgtcgattgaatgtaggatggaaaaaataaatgttgaatggagttgagttgagaagaatgaatacccagtggagaatgtattctgcagcaacaatggcagttgcgtaggctctcatggatcgattgattgtggatatcacagtggctccatctggaactgttagtgctgacagagatttgcagaactctgcaggatctgccacgtgctcaatcacctgcaaaaaaattcaaagcaaatgaaccaatgcaaggcaaaatgtgtccttcaactccactgagtactgtactactatcaaagattttacggtacatgtatgtcatatttttttttttttttttttgtatcccaacacccatgtatgcactccaatctgcaagcacacaaccagaaagaggtaaggggcacgaaagagaaagtacctccaaggccataactgcgtcaaacgttcttccttcttcaactagcttctctgatcagtcaattaaaattgttggtgagttgtaaaatgcagtgcataatacccaaaaacataaggacaatttgaaacgaactagatgaatgcaagcaacttttccttttacaatgattattgaagccatcatgcatgtactgatgtaccaagagcgttcaattttttacaaacatgctactaattacaaagaaatgatgacatcgcaatgaaaactataatttcaactatagaagatgaaagaatgttaagtatatgtaatgtaacaactcttttagcttaaaacttattcacccacttgagcgatttagcatgtccaagtatgataccttgtataatgagaaacattaagggatagagtaaaaactttcttcaatgtaagaccctagtaggaagacataagatcatagcaaaaaaaattgacttttctacagccaaatatacattctaagactcttaagataaataacataaaatggttattaactacaagctgtaagaaaaacaagaaatcacaagccaacaggaagtgaaaatattgaagttttttatgccaatgcatcatgatctcgtaacttttgaaactctaaactatccagtaaaggtctgaatccatggaaaaaccactcagaaaattagataaaaggaaattatgccagtcagacttgtgcttcttatcaagattgtgaactaaactgtattagcattcatttggataagtagggcatttcagcagtagtgtccaaatgttaacagacttaaagcatgcacgtccaaaatggatgtaaaacaaaagtgtaaaagaatgcttcaagatttgtaaatgtaccagctgtcgtgcaacagaactcaatagatgaagttgctggatccaaaccctgttgacaggagataataagttgtccggcaaatagtgaagatttaatttactaatgttggcaactgcttcctccaatatatagaatacagcaatctaatcaatttgtaggacaagactgacaaatttcaaatattcaaatatagaataagcatacagcatgaagttgagcaatcttgatattcttctctacagcatcaacacccatcacagtagctcccaatcgagctagtggctgaagaacaaaaagagaagcatggctataaattataaaatagcaacaaaaaagagcacaaatttgcaataaaaaaacaataacaaacttaatactctataagtgaggggaggccaatatgcaccaaagaaataattcagatttccacaattcaagtattcaacctaacaaatatagtcacctcgaatccatcataatgctacagattcgcatgaggattatgataacaagtaatatagtcaacaaatatagtcatctctgaacttattataccaaactataggtttatcataggccagaagataaaaaggaaaaggtcttttccaaaaatcacaggaaaaaagaagaaaagatatacctcagaaagaattccacctccacaacctacatcaacaattttaagtccttcaaggggtttagcactataagggtccttcctgagacaagggtgaaatctaattattatttgaatagaatcccgttagagacaaaataaaaatataaacccattgtcaaccgtaataccgtttttcctattgtttttcttcttgtttcttcatttggtttgtgtcaaaaaataattcagttaacactttttattaacagatacttcattagaatcatcttcttacacatccttatacgattatatttaattcaaggggtattaaaccaaattcctaccatgtatgtgtagcaaacactaagtgctattggtttaataagactgcataaataacagtggcttggaatctgacacagtacaaccagattatattttaaacccactaattccatgcaaaaaaagaaaaaggaatcaaattataacatagcacaaagcattgcacattctaccaaagtagtttcaagaataaacaccccagactcaagaatggaggtacaaggactaaatgaaagagcaggcttacttgaaatgtcgacaaagtgcagaacggatgaaagcaagtcttgttggattcatcacatgcaatggcttaaaggggccttcagaatcccacctattcacatcaaggaaagggcaaatacatgtcatccatattctcaaactaacacacacacacacacacacacacacacacacacacagtagcaacaacttcaacaaattcaccccatgaaaaaaaatgtgcaatttaattttaattgtggtgtttataacaataaattcattgaacagattctctctttcgtttcgaaagctgaccaggtatcggcgatggcggcgaacttggcgagctcattgtgcttcaaggatgatgatggaggcgaaggttgttgtttgggctgcggttgaggcattgaagaagcagcatcggcgaagaacctagtagtagcgttaaggagaggctgaaaacgatggtggagaatgcggtggatggagatgcgattgaggtttcggagatggttgaaagccatggccacggcaatggcaatggttccgcgctcaaatcttcgtctcttttcctgaactgaacctgaacctgaacccttcagctaggtagatccatggctgcgaacctgtcggagctcctgttttgaccagattgtagaaaacgggttcatgtttttaaatatttagaattttaaaatttggttaaatagtgtattttatgtcccatttttttatatacatctctccatttaaaaattcataaatctagcgatgttaaaaaaaatctaaatataaaacacttctttaactcttccacccaaattatactaaagaaagtcataaaaggtataaaaaatatgtctattcacatcaccctaaaaataagattaaagagatgaaaaattgataatttatatagagttattaaatggatccaaccaataactaaagcgcaatatatgaaaagaaagcaaaatacaacactatgaaaaattcaataatttataagaataattcaataattttttaaataaccattttcaattcaattgataaatttagaaaaatatttagtgaaaaaaaaataaagaatgagtttgattgtgaaaaaattggtgagaagtgaaaaaaaaattcaaaaatataaaaaagtatgataccttcattacattattttaatttaaatatttattttcaaattatcttttattttattctctatcatcttaccaaaccaatccttaaattttattatcatataactgtaatattatattcttataaaaggatgtagagcttttaagtgtcactggccatttatgagtagttagtaagatcatttagtagtttataagttattttgactagtttataagatagtataattaaaaaaaatatattttatataataaattatgatttaatgattgtataaaatattttataatatgtataattattttctcattttttattatatatccaccgtgttctacggtgaaggttcagttttaacaacgttcatcttaaaaaaaagtcattaacgttgcaattaatttaattagaatctcctaaaaaaattaattagaaagtcaacattggaaaaatatcagaaaaaaaatctgtaagaaagtcaacttaaccatctaagcttttatcttaaattatactattagaaaatatagttgtccaaaaaagaaaaacttagttaggttagctagagaggcattaccgaaaaccgacgttgttccttcctcgatggagtgtgtagtaagaaaggcggtgacgtcaaagatttgaactagtcactctctgacacaacacagaacccgatcccatcctttatcaattgaaccaaaaaatcattacatacacattaatgttcattcacacactctcttattctcatcccttcttcaatccaatccaattcaattcaatccacattctctctcgcaccgaaaaccctcgccgccgcaatggaaaccaagaagctccaccctcgcttctcgctcggccgccaatcctccctcgcgccggagcgcgccggtgacggcgactcgtcggagtcgctggacccggcggtccgtttgatgtatcttgtcaacgaaggtgactcggacgggatcaaggagctcttggacgccgggagtgacgtcaatttcaccgacattgacggccgcaccgcgctccacgtcgccgcctgccagggccgcaccgacgtcgtcgacttgctgctccgacgaggcgcccacgtcgatccacaagaccgctggggcagcaccgtaatttcactctctttcgctcttctcgctgtctcttattctacactcgctgaccctaatttctggattggattgtttaacagcctctagttgatgccatgtactacaagaaccaccaagttgtcaagcttttggagaaacacggtgcaagacccccggtatgtctcttcttcttagatcttattcatttcctctaaaaataaagatgttattcatttcgagagattaatagatagatgtgcacttttggtgtggaattttttacgttgtctattaatcagatattactttttgtatgacttttttaagtagttattataaaaagtcaaacatatttatcatgaatggaaatataattttttttacgctgtctgagcatacatataattccagttcgcctaatagttcaagcttttagaagagaaagtagtatataaactgacactgtacaaattttttatatttcattcaatcacaattcgtaataccatattgttgtgtatggtaggttgtttgatttacaataaatacgttatttaaagagaaaacacttttttgaataaaataaatagttttctgctcttttgatgtgtttgtctaactgttttttttccttaaaaaagtagtactagttttctgttttttgtttaaaaaagtattttttacaaatcctatttgcttcttaaaaaagtattttttacaaatcatatttgtttcttaaaaaagtattttttttaaattgcttttacactgcagtgtatttttttacactgacagtgcatagatattaaactccttttagtataggttgtttatgacatcaagttgcaactgaggactttttattgtagatggctcccatgcatgtgcagaatgctcgtgaagtacctgagtatgagattgatccttctgaacttgattttactaatagtgtttgcataacaaaggtaagctttcaagtttcctttctctgtatggtcaattgttttgtaacttgatttctccttttaccttgttttgacatattctctcaagtcaatttaccctgatttattttttgtttcatattttatattgaatattagggaactttcaggattgcattatggcgtggaatccaggttgctgtcaagacacttggggaggaattgttcactgatgatgataaagtgtgggttggtctacctatgcaatctgttgtttcattcatgtcaattactcaattggatattcagttctcaatttttgttctcatagtggattttgtttgttggtgtctgtttatcagaaaggcatttcatgatgagcttacattacttgagaaaataaggcatccaaatgtagtccagtttttgggtgctgtaacacaaagcacaccaatgatgattgtcacagaatatctaccccaggttagtcttggtcctacactggttatatggaagattttttatgataagttattttgcccgtggtgtttatgaacaaatcatattggttagttggctaatggctatcatagataatagtgagctgaataaaatatgtggtcagaaatttatcattttggatatagtctttggaaagaaagtgactagcgtaggttcaataggactacttgaaatctagcattatgttggaggcacaaaaaattaatacttaagaacttaatatgataaaagttatactgggactgatactaattgttgaagtgtcaggagttatttgcaattctgaataggccagacaggatttggccctctaagtgaaaaagtgagggattatctacaattgatataaagtcggttatgtatacaaaatgctttaattcaaattgatgattggtagattcttactttctcactttctcactttagaggaactgaatccggtcagacaattatgttcctgttctgtctagaagttataaatatctaaattgaaggattttaagtaatgataagagataaccattttagtctagtattgataagtgctgaattagaacttccatttatctttattgggatttcactttatgttagtgaaatggtgaaaaaaataaggaagtgcatataattaggaagatatctcctctatttgtgtgtataacgtggttaactataccttgtatttttcactattgtaatgtctgacaatttggaatggattatcatctctttagggggatctccgtgcctacttgaagcagaaaggtgcattaaaaccagtaacagctgtaaagtttgcacttgatattgctaggtcagtcaagagctttcatattatggatgcatcactagctttcagttggtttgcaaggaagcaagctctcctgattatttcatttgttgaaaagttgaataattaatgaagattttctcctatattaaaaattttcatttggatatttgtaataattccaaaatatgtatattttgcaggggtatgaactatttgcatgaacataaaccagaagccattatacacagagatcttgagccttcgtatgttttatgttctcctgtcctgtcttgttgattttattattcttccagcatgtgtatgaagtatcgtggacttttcagtagaagcatgcatttttaattcattattgaatggttagaactgtttaaagtttcttcattgtacatgagtaagacaacagaaatatactgcgggatgattctgggcatctgaaagttgcagactttggagttagcaagttgcttaaagttgctaaaacggtcaaagaagacaaacccgtggcaagcctggatacatcatgtaagttttcttctttagtggagccctggatagataatgcaagttttcatctttagtggaaccttgtaatattcgtggtcaatcatgtcggtctgcataaaagcaatattgtgaactcttatttcatgagggccgtaatgtgcacagtgttgcatattctgcaaggaaaaaagaaatgctgtctactcagtgactaccatagacagttgtcagctggtgctcaattttactaatttgaatttatcaattgatttataaatatggccatctcttatatgtataactggttttattttaatcctattgtaattggttctgatttcaaagtttgtattgatgaatttattcaaatctgtaacagggcgttatgttgctccagaggtatatagaaatgaggaatacgacacaaaagtggatgtattttcatttgctctgatattacaggaggtaaatcattattgctcatctttggatgcatgctgattttccttattttagagcttttaaatgacttccaagttaattatttacccttattatgtgaatggttgtatcttctctggtcttgaaacaagacttttaaaccctaaactggcaaattaattaataaatataaaatctgtttgatgaattgatgcttgtggaatattatagtggtattgagcaattaatacatgctaattcaatactctccgtcccttgtaatttctgtttatctcatcacataaaacttttaaaaggctgttaattgcatttgctttcttaaaaaagaagggaatttactttatgttgtctgtgctttttcagttatattttgagcaattaaaagcatttacataatcctgaacataaagtcatatcccctacatacatacatctgtgttgttcatgttagttaaaaaattggaagttcaggaaaaggaatgcattgagaggtgtatcatctgttgctgtgtatcctatgttgcttttggcattcaaattccttcagcattgttacgtcatattgaattttagatgtttgatggtgtcttttacgcataggacctctttcacttgtcaagtaaatacgtataggagtctatggacagctcaagcattcgtgacttgtgagctctgcctgctttgtccatcagataatcctaaagatatgtatattatatataattgtgatatacaatgctttattgcatattttaaggttgatctaatggacaggtagagttctagagattttgagttctccacatattgacccaaaaaatataaatgtttgtatatatgtgtatattcatggtcatttaagtaagatggcccaacagtttgttgtggtaccaatatgttctcgtacttttttttttatgtgaagacaaaatgttcattttctgaaagttcaaaatatgattattttatttgtggatgatgggcaattttgtatatagaatatacagattgacaaccaactgtaggttgttatttgtagagatgcccagcaaaatattgacaggaacttgcatgattttctgttcctctagatgattgaaggttgtccaccgttttatgcaaagccagaaaatgaagttcctaaagcatatgttgaaaatgagcgtccaccatttagagcttcaccaaagctttatgcttatgggctaaaacagtgagggttttaaatacatttaattggcagcagatttgaatgtttagtttcaaaacctaccacaagtaggaaattaaattaataagtttttcacattcaggaaatttgatttgtccataggttaattgaggaatgctgggatgaaaaaccgtacagaaggccaacatttaggcaaataattgggagattggaagacatatactaccatcttgctcaaaagaggggctggaaggtatccctttttcatgtgaatatttctttcatcaatttttagacctagttatggtagtatataacttcgcagtaatttttaatactaaaacttaacagaatgtgaggaatttcagattcaaagactttttctgtatcattggatggatattaataatttttataccaacgtaattttactagagtgactgtttttaatccatctcaccagtagaatgccctcaaaggtgtggatattgtgcgatatagttattttacaacgagactgtgtgattctttgtttcctaaggtgtaatattttcttgttatgatacacaggttaggactcctggatgcttccagaatctggaagccatatttaggggtaatcgcacaaatccaagtagccgatcatctcgctttacggccagataaatatttgccttgccatcaagaaccaataaattttttgatcatgcagtatcatatacttgcacgtcatatatatagttttttgtaaataactttcgctcgacgtgcggttgaataaattctgaaacgaatgtgacatatcattgtgtaattttgtccaaagacattctttctagttcttgcttataaaaaaagttagttcttttctaagctttatctttttaaaatattattttaaccttaggcatattttgttaagacgctgttctttttcaataaagaaggtaccatgtcgttgctcctattctcatgtgtgggcctcaagagaattgagtacctgtttggaccggtgaacagttttactttttaacactgatccttatgttatcttgtttgctttcatccatctatttaaatataattgtaaatacgaagatttttgctgcaaaattaaaacaacgaaaattgtctttgcaatatagctaagtggcaatgttttgcttcctagtttcttcctcagtaatgatgctgctgcctatgattctgataacagacaaccttgcgaatctgaatgcaggacgatgatgatggatagaagctgccaatgtcttttcatttgtcttttttaggaaaaactcaaacattttttttatccatttgaatcaaagaatttataataactgtttaatcaattaaattaaatccttttactgtttacacttaaaagatgaaagaatttttaaggaataacaaacaaagggtcattttgttacatgcaatcaaattttgttgtcttcttttttaggcattaatttttttttttgtagtttctaacacactgatttttctctgtgcccgtttcgcatgcgcttcgcgcaccattggcgctttgctctcctcttattcttcattggaggttcggatggacttcgccgttctttcccaactaaaatagaaaaggcttcagaagcttggctagttctccttactcggacattctgttcatccgaccactgtccatgcttccaatttcgttgtaacgagatctagttctggagttagagttaacatcgattgttaaactccttttcggagagctcagaaaatgcagactgaaagtgaaactgtgttatttccactataatttttagtagtctgggaacacctttaagccgggatctgcttttgcaatgttttgtgcatgttcgcatactttgacctatctaatgtctaggttggttcagtgccattctgagggtttgtaacaaatgtgtccagatgctgctgcaactgcaatactgcaaacaagtctacgacaatggacagtggacataataagagcattttgaccgttggcgttacctatttttatatttcttttttcataattcaaccttttatttaaaaaagaaattatttgttaatgggtttgatttttttatacattgttaatgtaaatatttttataatgtcacgtggaaactaattaaaattaccttaatatcactttaaaaataatcttataaaaattaacaattttattatatatgttagtttatgattaataataatgtaattttttatgttatcattaattcaaaaattgataacgttgttaacttatttcatcaaaaatttagaagaaaaggatattcataaattgaagtctaactagacccttaaaaactttccacttgtaaactttgaaaaagaaaaatcattttagatatttgcattccatgagcctagtacattttacaacttaggttgggttgcaaataggactaatggatttcgttatgagtataaggcataagtatttattggtttttggtttgagtgacagataacttgatccccctcaaataaatttatgagttgtatatataaaacttaattagtctcttaactgtacaaagttctaaatttaaaattagcatttgaatgctaaaaatttaacaaaaacatgatccactgtaagttattcccccacagaagcatatcacaactttgactaccagaataccaggatgggattacctttctctataatttgtacccaaacagtatttttgcttacctgctagtaattaatttttaacagacgatctgaaatctgaaaatatataaattcaaaatttaagaagaatcaatataatgtttgctttactgctcgcatttaggcatggacaatcaatgagttcttttaaaaaaattaactgatgttttcaaaaatttaattatgttgaaaataattaatatgtattctctctatgcttaattataaaaaaaaaatatgtattctctatatgcttataaaaaaatatgtattctatataatagaagttatacactaaaactcaatacgtttggtactttttttaatgaataaaagatgatatgataataagtaatgatatatcaatacatcagacattaatttaaatatcatttatgttaacagtggatattcattaaactcaaaaattgaagtcattttaattttatcgctttcacatatatacaggtacttgaaaatggaagttgaatttttatttgctgaaggtttgttgctttctttttttccttactgcttgtttggtttaatgtttatcacttgtcgatcagtatttgatctcaagcaggagctataaatagtagcttctatttttctttcatgtcattgatgtgaaaataccacttctcaggtatttgatgtataacaaaacacaggcttaatctctctctctctctctctctctctctctctctctctctctcttgttttcttgtttaaattaactgtctagactttacaataagcattaggcagcacaaaaaacaacacgttcaatattattatttttgcttcttttccaaataaggagtataaggctaaatgagatgaacttttgtaatttaaataaattgaatgagatgttagttaatttgattacgaagtgattttattgatttgtaaccagacctagagggagacatcaatcctgtttgatagttaaaactacatatcatatgatattctttcatttaggccttaaatgaaaaggataaatatatacgtccactcattgtgagataaactgaggtgaattagttttaaaaaaaatataaataagatgaaagataaagtaaatactactacatcttaatgagggttgaagtgaaaattagcattaccaagctttcccctcttattattctctgttaaaacttaaaactaaaagtgctacaatttcaaatttaatggtgcctcgtttctgaaacaccaatcattgtcatactagtgttaccttcattcttaattttcacacgtaaaattaaccgctgcaacaacacacacctgacaccattacatgttgcaaccgtatattctactttagtacgatctgaatcaaacagtgaaccttaaagcatcaccagacacaaatgaaaagaaaaagatcaatataactaagtagtaataagaaagacaatgtcacttttgagagatattaataatttaattaatttgatacactgatctttatgctattcctatcaactaagttagacattatttgaataagatgtttgaaataattattacacaagttgatgattttcaattatatactaaaaaccaaggattaaataaaattacactgtaaaaaaattcattattaattaatatattataattaatttctaaattatgttcatgagccatttgtgtacctgagaacaacacaagcttggctcagaaacaaacttaagtggtaacaaagaagtgaattggatgtgtaggttgagacagatatcgaagctagctaatatatatctaattgctttttcttcggttttggtgtctcatttgtttgtatatggaaattgttaacttcattcttagttatcatgtgctcatccacatcttaaacatgcttaatagtattaaagtgaagaattactgtttaagtaagtaagaaaagtgtgtcttgtggagagtgaaagagagaaagacgtacggtgaaaggagggaacctctttgtctgtaggcccattttggcttacaacttcctatttgagtgccattttgggagctgtcttagcacagttacttttgtctccctcttaattacctggggttgtaattttgtaaatactctttttgatcttttattacttcaaattactctatgaaattacactcttttatctatttcatagatgttttaactataatactttttattgtcaaaagttatactatttttttttcaagagataggtgttcattttattgtaaatgagtatttcaccagtaatttttcttaattctcaattcagctttattgatggccaatttttagacacctactatcatttgagacttcataaaataatcagtttgaataaacttttaaatctgacagtgaaagtgttcagattttcattttcttttgaaatgttaaaagtcaatagtaagatgctcaaaactatttgtcactgattaaaacttagataaaggaaaaatggtcctgtaattttatttataattactcattatttgaactcttaagtataaacaggagtcaggagtataattaggacaattaaatattttattaaaagtatttttttatcataatatactttttacctacaaagaaacttattgtgtttgaaatcacgtgtgtgaactgtattaactgtggaaaccaaatccaataacccataagaggcataaactacaacatcttgcttctgaataatgcggatctgggttgacacaatgcttaagtaaacacaacttaaattaattaacgaaaagctattgatcactaagtgcgtagattaattgatggaaattgttttaaagttcgtttgagatccaatagttgacataggcgaacatagatgacaagttaatgtaaccaattcaaattttatactacaaaagcaaagtaaaagagtttgagtagatcattagctacctcaatggcatttcgtgcgtctgacttatttttctaatagatagattgcagctagctgtcacaatatgttgcatatatagcaaatctgagtcatatgatgattaagatgaaaagtttcttaatatcacatgaccatttaaaaaaatgacgttagttttatattctaatcttaaccatctataataaaatccaatggtcaataactcaatattcatttctcttactcttgcataaaaaacttacttttatatttcctgtaaatgtatataagattgtaactttttctaaggggaaaatttactgttaattcacaaaagtataaataaaaaataaaagtatgactttaccataccataaagcataatgtgatgtgaaaccaaattaatattatcaaaagataacccaacttctttgtagtagttctaaggagcaagtgagctactacaaacataaaatctcacaacagaaattaaaatcagaacctgcagcaggaaatttaaaacctttatagtgtaattaaaggcagcagcaacacagcctaacagcatgaactatgttactaacactgaaatctaataggtttagatgccaacaatttatatcataacgggcaagcacaaccactcatgactcattcaataagctgttctcatcaaactagtagcctagaacctctttccttcaacctataaaagctaaataatcaggattacaattagtgcatcgagtaacacataatgcacaaatgtgaatgaacatacaatttgtttattgagtaattagcgtgatcagatttcctcatccagaaagccacccgtcttatttcttatatatattggtgctgttcaagaatgaactaacagtgttatgatattaccatgacaaatttcagctaccaccttgtctctccttacatatcatttggtagtaatatagacaaaaaccacttttaacttttaagcacaaatgagtgcttacacccttattaattagactcaatgattttctgtaaacatgcacctacagaggttttctcatgcaaaaagttgacaggatcacatcagcctcataacaagtacaagatatttgtaagagtttatcttcgaccaattaataaattccaatttacagatgattcctctcttcgtttcgttttcatttttgttctccaatagatattccttactcattaattcagcaaaatccatatatatatatatatatatatatatatataaatgaatgtcttccttgaaggctccataatccttagcatgatgaacttgataattgctatgcatacttagtttgtgcacttaaatgacatagcaattatttaatttcttctcttttgatgcttcttttgacttaaaaagataagaatttagattcttttgagtttttatcttaagaatgctaaagttagtaattttacaatgttttgttctattttgtagagtttttggacacatcaacacaagaatggaagatgtatgaagaatttgagcatcgcgctcaacatgcctcagcgcgagaagccaatatcatgcatgagtcctaagtgcgcaattggaggcttagcgcttggtcacttaagtcggttggactttgcatgtgcgctcagcgtgcacatgcaggtttagtgcacattcattttcgaaaaacacgaatgtgcagcattttgaagaataaaaaggaggagcactgtactattaagggacaaatagtaaggcacaatagggaacgaaaacccactcacttggagtccttcttcttctatttcctttgcttcattttgtatttctgagtctctcatgactatgagaggctaaatcacccattgttgggggctaggcaaccaaacactcttgatgtgatgatctttactaaccattttatgctattttaatattattgcttcttttatgagtttattgtcttgtttatgatttgatcacccattcacatgtatgttatagggttttaatcattgggaaatgtttgtaccctaagaacttgaaggagcttctaggtaatccatgtttagggataaaatggtgttatttagccttaattatgcatctttattcttaaaacaaattatttgatgtagttcttaagggattaggagtgaaattaggtaatttaggctattttacatgaggaaacatggttagggtaatttagaggataaaggtaatagttggaataacgttaaatggtgaaaaatctctaacattgcatcaagagtagtttcggtaggtcgaacacccaacacgtccacaaaaatctgcaccaaacgacaatttacacctccaagcatttgtttttctgtctcttgcgtgtgctctaccttgttatctttatttacggttgaattttgcatgtctgcattatcacttgacaagtatatagtttagtcatttattagtttaaacttagatatatacaaactctgagtatagttaaagtctatgtggattttgacactcggtcttaccgttttactactacttagacgaattggtacacttgccaagtaattaacaaaactgaaactcagaagcattcagttcttgagctactacctcacaataaaagaaataatgctcaaacaacaaggttaatgtttctttcacattaattggaagtcaatgcttttgcagttcaaaaccatacggttagcaaattaaagaaactcaacaaagtttattttatatctttggtcccacaaaaacttggtataaacaaatagcattaagtaactaattaagtttccccaattaatagttctcatgctttcgtttcattttgctatatccatggatttaatgtcataaatcatcaataactagatctctggaagatccttttacacctaaaactcaaacaaatagttctcattagtatcttcaagtctctaaaatgttgtttgtaatttaaaagcaaactctaacatcaaggtggaattccaccttatttgaacaccccagacacaagtgatttgcttttcatctttgtacaattcgtcaaatttttaatctcactatatttctatagtcaaattaacttaagagttaccccctccttttgtcaatactcagtaggtaacaaattcaccataatcctcttgtggactgtgtacttctttatctataaagggggaaatgatgcacatataattaaattcagattttgcatccacgttcagtccaacaatcagtagtaaggcttacattttgcaaggtaatttacataagagataataagccctttcttatgtttttatttatgaaaattttaaaactgttcccttgctggttgtcattgtacatcctggatggaacattaaataaaagctgaacaacactcaagttgtatctaaacccttctgctttcacaaaaacctaaagggtagctctttcatgattgctatcctactcaatgcctctcctgcattaattgttcattcaattatcaaagcaaacaacaaccatctccttcatcttttctttctgggtggaatgacaacatggtttacttatgaattatgatccccgaagagcttcagaaaaaatctagcattgcctcaataaataaatgccaatcattttttaatttcttgttcctgtctgaagcaaacttaatctcatgcatttcatttgtgacttatatttatatttccccattgagaaatgtctgtcagtaacagactcttttgaatatactctttattatggattaaaatttattcaaaactcacaaaactttgctcatctgcctcaatcataattttgtagttttcattaattaaccataaattaaccatcgtatagggaatagagactgtattgctaacactcttctaatatcccccatttgaatgcataaaacaatttcagaaaaatattccatactcatgatggaggtctagttggaatttcttgttaccttcttgctgtatattgtgttgcagttgtttgatcctcggacttggttgttgaggtttcaattaacagtgacttggggaccttcaattctcttggagggtgcttgcctgcttggactgtagattctgtttcaacaaccttcaaaggttgaatatcaatctcctccaacttcttcatcagccaggatcagcaaacaggaaatgatttcaacaataagatgcacttgaatctgatcctcaatctgttacaggaaaaaaaaaaaaaaaacacatcattggaagagaaaggaaaaaaaatcaactgaaaaaatatccaaaatatggttgaagtttcaaaaataacaacaaatttcaacccaaacacctgacacctgctttgctcattttgggaatgaaaatcagcaaaccactgtgttacttcctactcctcaaacaaaaattgaaaaaaaaaaaaaaaaaaaaaatatatatatatatatatatatatatatatatttaagctcttccagaaaagtgctgagctaaaacagcaagtccatatatattgttatcaccaagtccatactccagccgaatttaaattatatttcattttctttactgaaatgatcccttgattaaggattgggggcaggtatcataataaaatgagtaacaaaaaatatatatcatgaatcatgatatcagtaagtaagttatatatgctaaagaaatagaaatatataaaatagaaaatgcatggaagactttccaaactagaataaagactaatttgatgaaattatatattataatgattataggcacataccagatgagtgaggaggattcgggagtgtagagggaaacagagaggtaagaactgaaaattgcatttgggtgttggaattggaagctaggcatgatgcaaacgaaaccaaactaccaaagtgagattagattagaattagacagaaagagaataatctgtgcactacacgacacgaataccattatcattagtgggtgggtcctaccttcttgtcgttttctttgaccgcatgcatctatgatgttttcagtcacttcgtgtatcattatgccagattgccacgccccaactatattcttcacagtaattatattcaaataagaatttataaattatcatataaaataatagttcatactttttatcataattattttaaaatttataataacagtgatatttgataaagttaaatgattaataatatttaactttatcaatacataattataaaactctcaaataaaatataaatattaaatttaatattatttaacatgtgaattaatggacagaattattttaatttaattaaaaaattaaatttaaattttattatgcaattgcaattaaattaaatattcaaaaataattattaaattttatttaactcgaataaaattacttcctacaaataatactcataatattataaaaaaattacatcatcaatcaattagaaaattattataaatataactttttgagatacttattaaaaattaacaatttatcatgattgagtgttcacaaatcatgaaatattttggattcaatatggtttataaattataacttttatgtaataataatattttacttttagatcacattataattgatatttaaagttatatttactatcacccaactataattttatctaacatatttatcttggaaaaaaaaaaaaactctatctacctgaattaaatctgagtgtgttgttatggtttggtctaaacatgctaaaagttggtaatttgcggtgtacgttactttaaagtttaaacaaacaaaaggtcttaaagtcaaaatgatgcgcgctgcaagaaactgtgtgacactgtgtgtgtgtgttagtgggggcgcctcatattctaagcatcgccacacacgacaccacacaactcgtccctttcacgcgcttcacgatacttccattccacgtcttttcagttctcaagaatagtatctacaaagttagaaaaaaaaatagtaataagatatttggaataaatgatcaatttatccctaaaaaatagaaataacaaatttaatttataaatgtataaatattatgataaattggttccgtcattaagtcttttatgtttttgtcgatcctcgtgtacacgtgacaccttcatgaggtcaagtgataagacacgtcagatattcatcattttttactaaatagtcacctaatatttgacttctcaaaacatcctgttttggaccaaaatgacagttaatgtttggctcctcaaaacacacaccttcacaagtcaaacatttagtgacaaattagtccacctcgtgaactacacctacgtcatcggcatcatcgtcacataccaacacaactatgtcaatgtctttgagtgcaaccaggttgtctgcattgtcattacgacctatcgtgacgttgatgtcacgccagagaagcttagccgcaagtatgttgagatcttcatggcccctgacattgtcctccacagcgttagcaacacctgccttgtcaccatgcacaacaagagcatcgccaagataatccactctgccatcgacattgagaacaagatcctcgacgacgaaacctggccctccatcgaggtccattccctcaagcaccaagctagcatcgatgtcttctccaacgctgccttttaattaccgtaagagatactcaagggtagtgacgaggcaatgccaacctcgaccccgccaagccctaagtgacattttcgtccaaaacggtgtgcattagacgtgtcttgtcctttgaccttatggatgttggacttgaggaccaacagtggatgtgccacgttagttacatttgtgtcatgtgtgcacaaaggttaatggaaacagtaaagacttgatggtcggactaacttgtcacaacatttgtacatttgtggactaaattggttatttcatatttcaaggatcaaattatcataggatacatctttcagggaccaaattggtcatttacccatagatgtgggctttcttgtttcataactatttatgataggtaaaaatagtttttatagctttttgaaaataaatattttttaaggaaaatgttttctagacacctaatgattaatatgctacccaatatctagggagcgaaaaaaaatataggtatgataagatttatgatatcataaaaagatagagatgaagagaaattagaggtgttaatagagtgtttaaaattatgagtagttcatgtataactactcttttttttagggtaaatgaccaatttggtctatgtattttacactaattgtcaatttagttttgtactatgaaaatgatcaatttagtctacaatcatgtaaatttattgacaatttagtcctaccttcaagtctccttcatttctgttaacgtttttggcaatgtggcacatgaaagacgacgtgacaaatccatgtggtggaagtgaaagccatgtgttggaccaaattgtcaattggagtatgtgtgtgcttttgccttttattaattcaccatttatcctcttcctttttacattttgtaagaaaaaggttgaattatgggtgctaagtttgctatgctctttcttgcctttgcatcatcgatgcccatgacgacttggcgacagatggtggtgtttggttggcggttgccgtttttgtttgatttcttcttatgcgttgaagatgaaaggcaactccgtaaggaaagatgttttttttttttttttgctggactttattaatgacctccatttttgtaacatttctcatgtggccatcatttttgttagatttcttcctattttttcgttattgtaggcaaacaagggattaaacatgtgttagggtttagggtttgtcgatgatgctttgatgaactgaaacaatgatgctttgttttgggtatgaaaaagaataaatattattattgatacaaatatgctctgttttcttcttcttttgactctattttgtgtgtttccttttactgaatgtttgaaaagattaaccttatgttataccacaaaggtcgatttgttcaaaatgatgaaagggtgttggagtatgtacgtggagggtgaagaatgttattgggactctggagactgaccttatgtatgttttttactatctatgatacatgtgcgtctttaaattcacaatattgtcatgaaccattttgtcgttaagttatattcgttagggatcatgttgtcattccaaaagaaaatattatcatgaaattagaaagaagagtcatcgtgttcttaaaatagtcattacctttataaattttaaaataaaaaaatcactaacattttagtctaaaacattgtggttgatgtggagcatctcctatacatgtggatttgtcacgtcatcaaggatgtgttatgttgacactcaacattaacgaaaacggatgaaacttcacgataggattaaattgtcaatatatttacacgacgaatgtaaagtacacagacaaaattgatcatttatcatttttttatgatacgatggtagtttttattaattatttttaaaattaaaaagacaaacttatttttttcttcttattttttaacctcgaactgtttttttaataattggaattacaaattttggttctccaatggaatctcaaatatctatataagtttttgattttttaggataactatgaaattaattcttaattcaaaattgaaatttatttaaaaaattataaaagaatcaaataattccttgttttcagtttaagtctagttctgtattgtaaatccaaaggctcatgttgaatgagaatattttaagaattatttttctaccataatgtttttagaagattttcttatatgcaagtgtttttagaagttaatatcgcattcagtgaatcataatacagtgaatcataataggtcttatcttaatctcgtataccgaatatttaagaaagtataaataaaaatgagaatatagattaacaataaaataaaaaagttgtattaaaaaattataaattcatatttaagaaaaataataaataagaaaaagacaaaaattattttgacgaatcaattaatctcttactcatcacaactagttgattatctggagtgatctcgtcaaaataattaataaccatgaagttagacaatttttttttatatatatatgcactaatacacacaccttattcagtgattttgaagaaacattgtaaaaagtattatggtcaattaataaaaatgaaaactaaatttgtaaactaacttacatttttagaggattatatacgtctttggataattataatgtacaatttcttcttacaagctagctttaattatcatttatcttaatctatatatctaaatttgtccaatttagatgcattctatccaggtatattttatgtacaaatgtccagattgaatacatcttattcaactgcgaccaacctgcatgcgtcctgtcttagaccatttctttttaaggtctcgatcgagtacatctaaagtatctaatcaaggattaagctatgctttaaagagtaatcttagttcacttagatttttccgtgcatatattaatattaaaattatttctattaagtattgcagtgtatatttttaaaaacgaatttaactagaaacaaatatttaaaaataaaaagaatcaaagttattgagatagttaatggtgagtggtgtggtgactatcgatagttgtcaaaaacagtgataaacaacagcatcatattttttttcatgtatgagtttgtttattctttctcatgccttgtcttttattttcaatgaataaaattagatggagagaacaaatttaactttttattttatttaactataactaatattttaacttccacgatgcacaagacaaacgtttatttttataatatataagtaggttctctctctcttttttcttctcattttttaaattttacattatttttactttagtttttatttatatttgtagagagaaaatttataaacaacagcatcatattttctttcatgtatgagtttgtttattctttctcatgccttgtcttttattttcaatgaataaaattagatggagagaacaaatttatacgagaaaaaattaaattatacttttataaactactctaactcttgcaatgttttatatcgcttttataaacataattttttgtttaattatttaattatgtaattattggaaaataggagaataattgtgatgtgacaatagtatttgttttgaaagtaaattttggccttgatccagtttatttttcaaaatttacatagtcatgtatgtaggtttgtgaatttaaagaaaaaaagatgtaaaaatctcataaataatgctcaaaagattcaagatgataagaggaggataaaaaaatgtttttttactctcaaaattgaagttgtcaatccttataaattattttaactactgataagttcttttaaaaaaactatttcattttaatttaaaataatattataataggatttgttgaaattgataaacaactaggaaagtaaagtatatataaataggacaatagttgtttgagataactttttagagatagtatgtaaaatgcacatttaaagaagcgcaatttttttatattaatttcattctttaaaattaaatttgttgcatatatagttggtaaaaaaaaatcaaattcaacaaattttatttttattaataactatgggtactaacccataggctaatgcatgctctcctattctaaaatgtatcaaacttatcttgtaattgggtctcttgtagtggactttattataggtattcttgattatcatggactttcaacgttttaagtcaaagtagatcgccttagtgatgtaagcctctaaaatttactctattttttatattaaatttaaaattgtaatcatatatgataattgtaattaaataataatgtaaaatatttttacattattagtgtattctaattattttaaaaaaattataaaagttgcaactaataaataacaaatatattaacttaaaaattaataataataataaaaaactagcaaaaaaccacaaaccaggcattaattgcgatttcgaattccctccccaatcaaaatagttattcctttcttctaattgcttccttgttgcctccctcaccatcataacttaattgtatgccatggcctaatttgattgatgaatgaatcaatggatggagttggactcatatcgaagcatctctcagtgaacttgtaggcaattatttagtttcaaattaagtaagtaatcatcaaatatttaggaaaagtaaatacaatgtttaaatattttgaagtgtctcaaaggacaaaacattttcatacgaagaacactgatatactattaaacaacaaatacgaacacccataaaaatttgatgactgaggggtttaattttacgcatgaaaagataaatatgttcttttcttcgaaaaaaagataaaaatgttcattgctcaagtatatgtttttatctgtaaacattaaagacattgtcaaaaaatttacaacaattcatgttattgtttaaccaactgagctagactctctccacactaagtgtatatttgaatatgtattcctataatttattttgaatcaatgtaattttctaaaattgattcaaagtaatttacagtgatatgattttttttttttggataaaagatatttaaaaagagactttaatacacaatgttttgtttgaaaacttgtactactaattaagattgattttgagtatgtaattataaaaaaaaattaagtctaattaaaggtatatttagaacagatgacataattaagaatatactttagacaaatatcgtgactcgaattagtattaatgtaaaaatatttctttaatacttttaatgagacttgagtctaaaatttataatcatatttttaatacaatgtcaaatatcatggtaaataaaaaaaatatctgactcattatatattcaagttaaggcatgtcaaccaagaattcaaatacagtcaagagtacttgttttaatatctttcttgataccttatattatcgttcattttttttactaatgtttcaccttttgtttggatgagaaaaaattaaacgaggaagaatagaaactttcaacatttgaatgagaataatttgttacttgtttttcttcctatttttcagatacataatttttttttattccctatttttcagctctaagaaggatgttttatagcaccaaaaagaaagaaagaaaattcactctatttctcgtgataaaatagtttcaaatagttgaataattaatgagggtggtgagtgtgttttgttttagagaggttgagatttgtgttttcagagaattatgaaaattgaattaaaacaagagacatatgtattgtaagttgataagaattggattaaaataagagacacacaaattataagttcatggtcaatgcaagatgtaaggagttgtcgatcggcagcaaattattatacaaaaaagattatgtcgtatgcaaaattaattataggtcaaattattatctgtttctttgtcatttttcatcttttttacacggaaagaaatgtgattgaggccgccactttattttaatttattttcaccatatttcataaatattaaattgacttttgttgttatatttcatttttaggcctctttctcgttgtttcttttgccatttccttgccaaacactgagaaaaagtgactctaaattaatagtaaaactctagaaatgaaagtattaaaagaatattgactcttattgttctctcctatatcacacctctttcttaccgtttctttgtcatttgttcgtcagcaagtagaaagtgaaagtgaatataatttcataaaactcaagaaatgaaaatattaaaagaaagaaagaaaattatatttaattttgctagtctatctgttgttgttacatctctttctcattatttctttataatctctgcccccatgaaatatgaagcaaaagtaaatctaaattagtagaactcaaaaaatgaaagtattagaagaaaagaagaaaaacaatttttcttctgttattttctcctatctgtacacatctttttaaaaaaaaggaagaaccataaagattaagtagtaattgaaatttgagtttctcctaaggtagtacttattatttaatgtataatgtcacatgatttatgatttagttctttttcttattatttaagtggacctgaaaaccatgaaaaataacgcgttaattgtatataaaaaaaaaagaaaacaacgtaagtaatttggaaactatttataataatatatttttaaaaaaaagaagtgatattataatggtagaaagcgcgtggattggtgggtgatcgcgtatggtggattgtttgtggtcttatggtcttacagcagaatctttgtttcatataagtagacgagcgtgggcatataacactacaaatctaacattagcatttaacaaatactaccatacaatatacattatacgccccctttaactatactatcatttaaatacatacatcgcttaaccttcggcgcagcacccaccagcaaggcaacacacacaattcgcaatcactttttttttttaatttttttttaagatgaaaataatatgcatggaaagaaaagaataaagcgcaagagttgattagcaataataaaataattaatcagcgaaaatcaattacagtaacaagcaccaacattaacattataataaaacatgagtgttaattaaataattaataaaatattctctcaccttcgtttcttctgtatctgtcgtctctctctctctctctcatacgtccctatcagtcataaattagggaaaagcaagcagacagctacacacaacactctctcctattcctcctccttcttctcttctggtgtgagagcgcaaaacgttgattactctctctctctctctcatctaatcataatcatcgatgttcctcttttctcagtcttcttcttcttcttcttcttcatagtctctcccttcttgtaatcacttatcatggcggctacgtttgatggattctccataaggtatatctatttttctattatctattgtttgtggatttggttttactaatatatagaagcgcgctttataggttttgattcggtgttgctgttgcagggactacacatccaagatgaggtccatcgacgttttcaagtgctggccgttcgcatccacctcctcacgtgacgtatcaccagaggaggttcagtcgtggcttccgccgatgaacctgtgccctagatccggcgattccaacgaacgccgcgttcaaaatccggagattccgccttctgctccggaagtttctagaaccgatgacgacgacggcgacagagattgcagcgaagatgaatctgcagaatctatggaatccgagaaatccgcgcctccttccgactcctcggcggcgaacaacaataacaacaacgaagacgagaaactggagatggtttgtccggtgtgccgcgaattcaacgccgcgacgctcacggcggtgaacgcgcacatcgacggatgcctcgcgcagacgatgagagaggagcgtcgccacatgaggattatgaatttgaaatcttcgtcgtcaaagtcgaagccgccgaagaagcgttccatagccgagattttcaaggtggaggagcagccacatccgccacagccacagccacagccacagccgcagcctcagccaccgccgcaaatcgagagggtgttgaagttctggccgttccgcgagggcgaggcggacgatgtttcgattaccgttacgaagttcgagtggctttctcggcggctggaggcgctgagatccacgcgcggaggcggcgagtcggcgaaatcggaccaaggagattcctcggaggagaagatggagatggtgtgtcctgtttgtcgagatttcaacgccgccacggtgacggcagtaaacgcacacatagacggttgcctcgcgcaggccgtcagggaggaacggcggcagatgagaaggtcgacggttaattgcaagcccatacctaaggcgccgaagaagcgctcgatcgcggagattcttacggtggcgccaccgatcgaagccggcaaaaggaaagcgattcaggttgaggaagaagatgaggagaaatccgattatggctattcaggtggagattcaactagtgccgccactcctgctgctgttgctactcccgttgcttcggtaattaagaacaagaagagtacgatgaagaatagaaacaagaaaaagttgaagaaggtgaagaagaagaaaaacaaggtggagaagcacggcgatagtggtgtgtggttcgtgaacaatgagaagcagacggttgcgagcaagaagaagaagaagaaaaaaaagaatgtcttcaacaacggaccaactgggaacaaggtatgtggtttgtgtctcataaaatataagttaatcttccgttatttgctgtgtgtttccgcgatttgcagctaattcctggcagataagtatacaaattcatggaatttgcgcataaaatattacccgacactgtagaatgtagattttgggttgatgtagtttcttatgccatgggattatagctttccttactctatgtcttgctttttctgcataaaattactgctgaaaaagctgattagagagagagcttcacatatttgtggacgaaagtgagtgtttttcttttggttgagtacttgagcgaaatacgcgacaagtaaaagttgggaaaagagagttacgaaaaaaggaaaactgtgaccagtgccttcgtgcgcggaagggattcagaaggtagtgaagcctgcaagaatgttgctccagctgtagtgtgtgttgtgtgtataatcagtacaagtaccctagctagaaggggccactcatgggttacgaggtagaagagagagctgagtctaatgatgaggggtttctctagccccgtcactattaactaataatttgggggggaattatcgtatgtgccatgggtagatcaacagattctcatgtatctcttgtggccagtttttcggacgtagagaggttttatacgcagcttacagctggatgtattttggcttgtgggagatctgcaagtggaggtccagaatttgatagatcatttattgggtctgtcagaagtgtatatttagtgatttggattgatgaatgttcgcatatgcaatttccagatgggcatgtatcgtcaaaaaagaatactctgacttgggttgatatagatcattatcgcatgggcatattttatggcgtattagtgaagtagggggtggtgatttatggtacgtataatggttttggactttctgtcgttgtgtgagacacctgattttatattgtgaaagtgttcgtttttgggtagaatgacttggatgtatcggtcaacataagttagcgactcatgttttgaacatgtgcagacaattttgagataagatctaatcgatgtgagtgtctattagaacccaacctaggaggtgtatatagaagcaatagaaaaccgaaaccaacgtcagtttgtggttacgctggccgaaatttgaaagtggaagtaaagtagtcaaatatttaacttggctagccatgaaggttactcgatgatgatataaggatgatatgatcttgcagccaactctatccttagaagtgaaatttataacttgactgtccttactgtatcagtaatggcatcttattatagtgtctagattgttttaaataacgtttctagactaatcttagtaaatactttattatccaaaaataattctcgaactctggttctatatttttcctacctaccatttcttttacaagattaaaatatattggattttttcggcattcagattctaaagaaatctcaggtttcgaatggggttatctggaccacgtagatttctacagaggtgtatcatatgtgatatgtgcatttctagtttcaacagtgaacaattacatagcagtctcaaattcatgtaaaaaaattatttaagcatcatgattcatgcatttgccattgtccatcccctccccttttaatagaatccaatatcccactaatttttaaaatttaatttaattaatttgcattttaaattgcctttctaaaagaacgaactaagtaagatatttatcgtataaatattttacaataataattttaacctcatggtgatatcgtttaatttcagaatctgtaatagttgtttgtcctaatactatttgctacatccatgcatgtgtttttcgttagcttcttcttcgtataaacaatgataagaatatatatgttgttatagaattacactttggatatgatattttagattcgcaaagtggcattgtagaaggtagaaattttgttacaaaaagggttgtctttacaattttgtttattttatcataaagtgtaattgcaccttaccggatttttaatatcttaatagcatataattattttacgccccagctttcagttacaacgaaattaaaaaaaaaataatattcgttccaaattctacaagcttgtttagcgttctgtttgttaagtaaaatcaattttagggatttgtactttctatcaacacgtaaaaattatcaataaataagattttgaattgaagctctcatgcattcttcatgctgatattcatatatataattatacattcatctagcttgatatatggttatttcatgtatattcactcgtaaagatttaaaaatagtagtatatttgtaccagaatatataagctcaaataaccttgtatttattaactacgagcatttctgggatgtattgattacaaaaaatttcaattgtttttcttagtacctaagtttattttatggctacttaaatatatgatctacgcatttatgatatatacatatatagatttctatgtttcccttttctgaaaattgatactaaaatgaccaagtttaagaattttgttttaagcgtttctgaaatttcttatcatgataaaataatgatataatttcgttcttaattcaattgtttcaattttataaacttctacatgtagttgatcttaatgtatttcaatttgatttgtttttaaatgaatgatggagtacttaaaaccccaattaaagtgttattcaaatgtcactaaagtcttttcctaattatagaaaattaaaaaaatttcacttaataatcaaagagtttctttatccagaagtttggatcgtgattttataattaacgctggaaatatagtttgtatagttccctgaaactttccatggtgaaattgttcttttgtattaaatctacttttacttgaccataaattccatttgaaaacgtctttgccgttttatcttatgtagacacaagatataggcatgaacgaagttgcctcaatctttcacaaaaagctttttgatgagggacaagaattataaaaaaaactgaaaaaccaatggtctgagtaaacttttagggacattcatctttggacatcaagttattgtaaattgtaatgtagcaacagtcatagacaattgaaatcctttcactatttctgattggaattgttgaaaggatatgaaatgctaattttctacagtgtctgtttcataaacagacattttggcatcattatacatgaaactgttgtaattttgtttattttcttgtaaaaacacaacatgacatccataaaaaagaaaagaaaggagaaagatataaaagctacaggctacaagaggtgttattatatttatcttcatattttgcatatcctaaaggttagtcggcttattcttattttattataatataacattcataattttattaatcttgtctatctcaggatgatgtttacgatcgcatggtgcgaagtgcagtaaacagttccagaaaactaaaaggtacaatcggtaataaaatgcttccacttcatgaggttgatccttctatcgatagaaagaaatcaggtataaattgcttatcggtaaaaaagaagcaacaagttaaaaactgggactcagttggaaagcaagaaaaagcagtatctccttttcatggcattcttaagaaccgcttcaaacatgtttctgaaaagacgtcaagtggcagtagtattggagatggtgctcaagaaagctattataatgatcaagaggcaacctcggacagacatgtgaaattctctggcaaagatgatatacttggtccaaaaaagacaaattcatttgatgaaaccatgttcaagatatcttcagatgcggtggcatcttcagtagtaaaggagaaggcctctggaagtgatgaagaaactgcaagtttggagccaaacagaaattatgaccatattgacagaggcaagagagaggaggtttgccctatagttgaaagtaaacagttttctaacactctggaccaagataccgtacaaagcttcttgaagccatgtatcaatcaagagaagtcaaaacagttagaagagaagtcagaattgttgactaaggtggcagtttgtgacaataatgattcacagtttttttaccgagggaacagaaataccctgcattgttctccgtatgctgacatttctagacctctttcagcagtccaagaagagcagatgtctggtataaatacacagatgtgtgaatctggatctttcagctacagtgggaagttcaaccacttggatgatccacaggttgatgctgttaactcaaatgaaaatacaaagacatttctggagccttcttcatcttattctgcttcatataatgcaaatgaaaaaccagaatcttcattgcaaacttatggagataaagataacagtggcgaggccttgggtaggcaattttctcgtatgttttctgcagatatgattgataactcattccccaatacaggctgggagaaaggaagtggcaaaaatagctgtttggatccggatttttttggtttgccactcaattctcatggtgacctaatcaatttcagttcaagtggaaacttagggatgaaccagtcagatacatcaagtacgttacgtggttcttttagtggcttacccattaataatattctccatcaaagtaaccaggaaaatttaagcattaatgagaatcatgttgttcagaagacatttccaaaagatagtcttaatccatttcctcatcatccaacccaattacctgtcactgagttacaatctagagagagagaagatatcaaccgacctaattcttcagatatgtgttccagtcactatgtcccgccacttaattcagagttgaactgtaagaaaaactcgttcattgaacagaatcaatgtgaccgggtctggaatcacaatggaaatggggtgatttctctgaaagaaggttcagatcatatctcaccaagttccagccaactaacaatgaggttgatgggtaaagatgttccaattggtagaagcagccaagagatgcaacaatttgcagatgtttggcctgatgaggaatccagaagaaggaattattctgaatatgctgctttagatcactctttattggaaagaagttctaagcaggaatgggtatctggttcacctatacaaatatcagctgacaatgtattgcaagcagcaaaaattcaaagcaatcaagcagcacaaggcaccatattgatgagcagtacagactctggattctctcaacagtttattggtcggcaaagtaatcatggagtcaacttcaatgccagttcttatttcaatcccattactcaaaagtctacttatgcagtatttaatggtgcatccaatgacttttcagagcagtttatacctggagctaaacctctaggaactggcaattttagtcactcgactcatgtagccaatggtgagctgaatgacaggaacaaaaatccccatgttacaaaatcagcctttggaggatttcctttcttgcagccaactgtgaatgaacaggccaaaacatcttggtttgatagtccctacagaagttcaccatcgtggttgtcaatctcaacagatgaaatgctaccagggatcttttctcggcaattttctgcttcaagtagtcaaaattttcctcaaaatctgtggggaaataatttcactacgccatttgtgaatcattcagcagaagttcgctttccttctaatcatctgacttcttctctaggtcccatgcagacgactcctctttctccagtatcaattggtcatccactacatgttccggttacaccctctaccataaatagtggtaatataaacataaataaggtcgctgacagattgaagtttgatgaccatcagctgtgcacaaataccagaaagagacctgcagctgcagccaatcttgatgattccagaaaacctaccaagttaccgaatatacgagtgcaagaaaacttcagtcgtatgactaggttgcctggagaaaagtcaagcgtggaattgcaacgaaacacaagagcacttgaactggatccgcacatgggcagtgctaggagtaggtgttgtcagcatgaggcacaaaatctaaatcctggaagttatcctgctgtaaattcttttaaactggacggcatggtaacatcaggtcctgtccgacttggtcctaaaagagcgaagcacatcttaaattcctcttaaaatatggatcaggatgacaagctattctgccatattctcacctgcgattactgacagtgttagtgatatagaaattcagagaaaattgactaaagtatactgattttaggtgtaagttatatcattttatcatatctgcttttcctcctccatagtatatatccatttgagaacataacaggattgtccatgtatcaatattgccaggttgctgaaaccggtggaaaaattgatataattccatccagtctttcgatacatccagctctcagttttgaagtttatgccctttacagaattttgtctccaatgaataatgacgctttggatatctatttttgagccaggtattccccacatggcatctgttcaatgactatgcaaagatgtgcttattactgatacaccagaaaggaaagaaagatgggctttaggataagggaatagtccatctctcttaacctattcaataaaacttgaatttggggctttagttattcattaaccattggatacttcctcattaatttgaactggcaaattatgaagaaaaaaaaattctaccataccggctttgattatttatgaaaaaattattatttttcatttaaaaacttctaaaaaaaatatgattacaagctgcttgaatataaaaggttaatccagtgaagttgcttttgatggaaaaatagtttaaatttgttttcatgtcttaagttgtgagagaatttaaactgaattacgtttttgtaattgttttaatatattaaataaatcaatttgactaatttattccaaggtcaattactaaggagatgttacattgatgaatttattaaatttaaacggatttcatattcatttgagtcaaaatgagctaatgatgtgtcagatattctttaattgccggtacactaacgcttattattttattaatgcaacacgaaataaacacaaaattttatcaaaatccaacaaaaaagttagtaggcaaagtattgcagtcgatcctcctgtttgattctctgtcttgtagatcatacttctccaagtattgtatcggccaaacttttttgtattttaaacttaattatgtattgccgaggtggaagtgatgctaataagtaatagaaaataataaccaacagcatctctgtatgaaaagtgaaaataaggagggggtgaagttgttacgttttagaatgtttccacatataaaatcggaagagtctaggataattcatcatacgagtgcatgattttatgtttcaatttttgttttcttcctgattttaattattatctgttaaaaaccttcattcaacacagtatcagttactatatagtgtatatgcataaaaaaagttacaatatagtgtatatgcataaaaaagttactatatagtgtatgccaaagtgttgaaggaaaaaggttgatcgaactggttttattctattataagattgggtttccgccactttaatttatacataatgactattacgtacgttgctttgtttgaagatgagtattacccaataaaggttgcttatgaaagcattatggtttttgagatcgtcaagcttttccattatttttatcccaattaagcatgagtttgtgggtacgtgtagttaatagttatgctgaaggaacttagaggaaaccaattagtaacttgcagtagaattctcgttaaagggtttaaaggatttagcgaaaaactgaggtaatttaaccaaataatttttgtttcttaactaaatcagaaaatgactatatcaaactagatcgaatgctcttacgtacattcttaaaccatggaaggtacacataaaatatatgaaggatataatcgctgccatttagtttaattaaacaatagattcctccgtctccttcatgttaaaatatacaaagaaagaagtatcgatttcacaatgttgacgttcgtttcattccaacttggtcaaattgatagtccctcactcatcgcttctttgcttctttttcagcctgcacatatgaaagttaacaaaaaattgttaaaaacacagatatatagatgagctttacgatgaagcaattcatagttgttttgtatcataccgctctgactactctatcaaaggcatcagggccatatctatcgttatagcgttcaactgctttccttgcatcgaaggtcatcatgtgaaggaccttcttgtactcctcagaataattggaacttccaatattctttatgtattgcctcacgtaattctcatatatgtaagccgctccattgaacattggaagtaccaaccagacgcaaaacataagcttcaggtatccccaaatgggaaacctgtatatatttttatgccaaagttcaaatattaaattactattatgtgcctctatatatatagtttgatttgacttgaaattgatgtcaacgtaccaagcaaggatcttatgagtggaaagctcaaagagggtcatgaaggagtataaaacccaatacgttagccactgttgatcatccaaggttgaaggactttcaattgctctcattgatgcgtatctatgatatttactcagaagtagtcaagaatttgatgattagtcatatcatgaaataattaatacagataagataatgtgcatgcatgcctctgcgtaggatgcttaattaatttctttttattgattgttaattaagaattacagcagttaatccggaggaagagaaaataatgatacacgattgcatgataatatgatatggcatttactatacttacagaggataaagaagcatcactccaggcctggcatgcagaaaacaaaaaaaaaaggctgttaattattacggggaaaaccataaaatgaaaaacctatagttacagttgtgtgttaaattgcagaatacatattatggtgaatatttttttattaaatgagcattgtacatgggatttagcaggtattgtgtgaaaagtatatattctgtaaggcgcagatataatatagcaatgcatgtgtaggagtggaatgaaataaaatatatatacgacacaaattacagatatttttaaaagcaaattaatggagagagattaatttgttcaccctattattgtgtccaaatgtcttgccattgttccaaggacacccatgatgtagaaactgcgatattcagatatttcctggtggggaaattcaagttttaagaagatttgaaggaatatgggtggtattgttgatgcatgcaaatatgtatatatttagtgtagtagcaggtgaatgaaggaaaggaaaggaatgtttgttgaatgacccaaaagtcttctttttctctcaagagaggaaagagaccataaagattaaggtatactatatgtgtaacaaaacgggaggggaatataaggatgccaaaactttgggatttcatgtgcctttggtgcatattcgagagttatcgtattaccttttgagctctaagcttttgtcattgtggcattaaatgttaccaaggtgcctaccctttcaattgtttttcccagtctcggtagagttgcgtaaaaagttctactactacggccttaagcctttagtatataggacaaaatagtacccatcaaattcaatttaattgaaaccctacattaatagtattagggtcccgagagaatctactttttctctcttcttcttaattttctgaaatatgtgtctatgtatacatgattttaatttcctctttagtgtaatatcagtataaaaaagttttgtgcttgtacttaatgttgtcctgtcacattatttaatacaatttgctatctcttcggtttattaatatagtacgtcaaatgttaaaataagatttcaagcaaacaaataaaatgttaaaataagattgaacgatatcaagaaagtgctttgagtcactagatcttgttagtgaaaaggagtttgaataatttgtagaaggtgacaaattcaaatttcattattatcattatacgaaaattatcttttattaaaaaatatatacaactatctaatgggaaagtgagaaatgagaggtaacatgttgaccataaatatatagtaggtggttaggattatttgacttaaatttaatcttgataatccattttaataatggtcagaattaaattctttcacggtatcatgattttttattttatttttttggtatggtttccagcttattgcattcaatacctctttttgaatgctaatttcattattataaattgatcttattaaacacgtcaagtttataaaaaaaattgcacaatttaaaaatgaactaatacttaatcaaaaaatttcatttaaactataatattttttttaaatataaataaatactataatattgtatatatatgaatttttaataattgaatttatcaaattcataacaaaaaaattgtgtaatagagcaagggtattggacttttgtcataaatgatcccaacaacttgtatctatgtaaaacattttctatatagataagaaaaaaagggagaaaaaaagttaaagtgtattgaaatttcatgtttgaataaagttaatacgttattagtaatttttatccactcacggttccattaaaaaaacaaagattaggcactgatcatttgatcatcggattgactctaattttacaaaattaacttcgtatagaatcaggcaagacgatttaatatcactaaaaggaaaataacacacctatacatctatgaaaaaaattttctcaaatgcaatcatgaacataatattgtatcccatttgcttgctacttgctacttgttatttcaagggtaaaaattccaatacatctgtttttctcttttccctaaagtgatgacatgaattgtacactcccgtttttctcttttgcctaatagagcccgatcaatacaagttacagttagtacattttacacacacacaaattccaaaagattcaatcagaaaaaagtgaagcggtgattccaaaattaagaaaatctaagctgattcaagcaatatggccagccaaagtaattaagaatcttgacatgcttcttctgcccaaaaactctagtcccgatgggttggccttgcttgtccacaagcaccacagcattgtcatcaaacttgacctcactttcatcacaccttccccttttgcatgcatggccgcacgcacaaccacaccatacactaccttttctttcttcacttttccattcggatgtgcctccttcactgatgttattatggtgtcacctaaccttgccctcttcttccctttcaattcttgaatgcacatcgctcatgagttatcaaccaccttcagaaccgttcccatctgtatgaacttgcgttgctgttgctgctaaagcaaaacaatttttttcattagtcagtcagtcattaatccatgtctggcatctttgcattacaaggttgtctacaacgtcaaatgactaagtttagcaaaggtaagaaaaataaataacatgtcattgaaaataggacaaaacttacatatatagttccttagatattgttcgcgatgcactgttctcccattagaattggagttttatcttgataatccgtgtaatcctttaatgcaaaacttactactagtagattacggaagtgaaactgattctaattgaatgacagcataaaaaagtaaaacacctaaaaaacttgacaagtattgtccttaaaaatatcactcatgatcacaattttcacaactatgatattgccataattcataaactgacctgagataagaaattgctggatgctatctcatgcgatgttaataaaccatagaagttgttattccttaatccaccaagcaaagaacggtccactagtttggttttcagcacatgaatgaaaccaaagcaagttaattactacttcaccatgcaaaaatcacctcatcaacatggaatataggagtaaattttttagagttataataattattagattttaagaaactaaatgattagaataaaaaataattcttttaaaattatttttataataacttgatatctcctttttccttccccactctctctatatataagtggattccctcccaccatatatatcatgtcaataaaaatgttaggggatctatccatgacataatgaatgcaatgcatactttggcctaccgatttacacaaagcttaattaatatgtgaaatttcacaacttcagattgactattataaagcgcaattttttcatcagaaaaaaaagagagctcaatagctatatactgaaggcttttatgaaaaacaaggagcaaacacaggggatgaagcagaataaaaaagtaaggacttacgaagagtgcatcttgaagtaagggttgcagcatggttgaaaacctgctcattattgggcctccattttttggtttcagagcataatattattgggccacttaaatctagcccatactcttataaacaatgcaaaagaagccctttagccaacacatttaattcacatcaattttactcactctactccttatcataagagatactttaagaaaaaatgaatgatactttttataagagattttagaatttttataaaatatttaatttttctttcattggttgatcttatcaaatattctaattatgagtcttgttaattagtgttcttgtaacattgattaataaattaaaatgagtaagtatttattacgtaaaacataggatatcattttattttattttagttttttaaccaatattccaaagacatatgtttaatatttgtcttttaagtatttatgttttttattgatagtgatttataatactctagcattttaatcttttcacatcacccataacaagttaatgattgttaataaggacataattgacacattagtagtattttttttatataaattcaatagaatcaattgaattaattaattttattggtttgtataattgatgtccaaaatgttttatagtaacaaggaccagatggagtattgtttaaatatttaaatatcaaacaagtattatgaagataaaagaagtttatttccgtttcttgaaattatttgataaacatataaatttaatagtaaattatactggtatatttttaataaatcatttttgttgtgtgtatccatagaacattagaaatagagcaaaatttgtcaatacaaatttgttcgttgtatgtagtttgatttgtagattattatggatctttccgtgttgacagtcaaacatatcctattaaggttgattaattgattttttttttaaagatcacgaaaatatctttggtcgtgaccaatgacgataagctacacaaagaaaaaatgagggattggatagaaaaagttatttattttcctttccttttatgatcccaaccaacaaaaagaaagaagaatgagggttgcaatgttgcaagtatacccccaactaattccatggtcaatcaattcaaagcaaatgcaaaaggataatatttaaatgacgttaacaagttgtttcgtctcgcacgtacacggtacacatttttttgtttcctacaaaatcattccacccatgccagagtgttgatttctttgtaatgagattttcaacaattaattaattctcctgcttcaactccttacgttgtatttttgagtcgtggtccctcacctaatcaatcatcaattggctactagtgttttaggaattttgacttgtgcttcacaaatcatagctgttaactatgatcacaatattgctgttgtggtgtggtccatacatcatgtattcattggcatgactatgaattaccggagtagacgatgtagggcaattggaagacaacaaattcgggtaaagcattttttttctgacttacttttactagccattcttaacatattatcctatttttctttgtcaactttgttttctccattgggctttcagacgcatatgtgcctcttctgttcgggatacaattttattgttgtgccccgtttccattttactaactttcatcgatagttccaaagtttttccctactatatatcctctcttagaaccttcagtgatatggttctctcagttctattacttctattattatcattataggattttactgttcttatatttgaatagtaagtagtccactagttacatgttttacttgtatttgttattataatatttttaattgtggatttctcggcggcagcttagacaccataacattccattggttataaccttccgtgtgtagttctttccgaaacttcgataatttgttttgattgctttgaggatcaatgattgtccctataaatcaacacaaaatttttctgcacgctttgtcctcactacaacgttttccgaaaaacttcttaaaatgtcatttcttttataactatttcaagtcaaacacatttaactgtgaaattcttaagtgacaaactactaaaaaataaatatatcttgttggaatagacaatatcaattaatttctttaagtcatcatcagctgtataatctcatatgcacaacatttggatctatctcattttgatgtgattcgataagagtgttacaattttagtccttttagtcgattctaacttatttgtaatccacttagaagtagcctgctcaattatcattgtcctgctgcaactatatatgcatgatgaaatttgtaaaagaagttcaagttttttggtgtactcaaatagtcaaataaaagcaacaacctcatttctggcaaaacttgtataattgtattgaggcagcatatctagcatgttcaatcctcaattgtcttaaatttaaaaatccacaatcatcattaagattgaatctactccgtaagcgctgactttaaaaaaaattgtgtgataaaatttaccgatgatgatcaaattattcctctgtggctctgtccattaacttcttatttggtgagcagtttgttgaatgtattattcaacgtacaagaagtaactagttttttggccagaaaattgtcaaaggcatttgagtcaactacattccccattcacattgaagcaagattttggtatacatccaatacaatgtatggatggttactgaaataatgtgaggctttgcaaggaaataactagcatctctaggaatcagtgttcaacgcaagtaaaccattttcagcacatgaaagattctcagcaatcatagttgaagtgtagaaatgacgtgtatgtgtttcaattcttgttcttgtcctacattcttcactctgtcccacctcaaaaaaatccttgatcctgatcttttttctttttctaatgcgagtataaagaattggttttcatgtcgtcatcaatccataaaagataatacttggtcggaaaaatatccatggagacttgagtcataattgacacctaaaaagaaaattagagaacagagagaaaggcgtaaatactattgttgtttatgtttagacacccactatattcaagcgtctctcatttttgtcacatcttatcactaattatttatctttcttcttttcctaggttatcactaattcagtcgtaagggataccaaatgttaatttactttatcaaacattattacttgctcgtagctaacatgagaaaatacttggggtaatttttcacgttaaaaactactgcgtgcatggtcttaccttctaactaatttaatcaccaagtgtttatgctttcatagaccttctgatttatattagcaagtattggaaattatttttctctgggaaatacctgttaattgtcgtagttgtaagtgttgaatggtcatataaatgcataacaactaactttaattagctctcatgtgatcgatcagaagttgtcaagaaaaagatgattgtatgcccaaatttcagacaccatgattatgagtaggtatgaaggaataattgcacttatcaatgggttattatcaaaaccctttccatgttagaacaacgtggtccttaaagaagaaacttcaaggattcaaatttccttttatgatgttaggtcacgtacgtaggaggctaggacatagaatgtagccttaatattggcattaaattgttcagaacagatggcatatgcatggggaaatttgaatttgtaaggttcaacaaaacaatggtatagaattaaatatatgttgctagagaatgaaatctaaataatggctagggaccattcacactgcagctaactaaatcgatgaatatgcatgcctatgaaattattagatggcactagttactggcaagctataggcgttcccgcaatacaatattagtttacattgtacctaaaagaaactcattattgcattaccaaaacttctactcgagtgtttcgttcacactattgtgatttgagttcgatcatcagatttttattagtaagcgatgtgtatggttgtagtttaacaggtctttttttttttttgtgaaataaaaggaattgtagtttaacaggtcttaagacatgtacagttttctttatggttgcatggttctgtttggaaggtaccactggtacccttttagtataataataaatttttcctttggctgataaaaaaaaggatgtgtaaattttagtataaattctcgctgacattaatatagtctttggcaattaaggagatgcgtttttccttaattaatctaatttttttatgagaaaaaaaagaaggaactcattgcatttgataaaatacatagggcattaggaattgagaaagatttcctttgtctggtccgcatcttcagtggattttacatgagacaaatttgatgatacattttcgatcatcttatactcacgaatcaatggcagcaggcagacagaagaaaagttgggaaatatagataattaattactatgcttattttctttgagcaaattatattgcctactctttctttgagttacttctatagcatactaccaaatgcaagtagcactggtagataacttttatcattcatatctcaacgatgtgcttatttagttatgttattgaaattaatttccatcggctcttttacttttccatggtatttgatatcatatctgaaacagaaattgtttgcaaagagggtcctaatttattcatcagtgaatgaattagatggtgttgcaaaatcgttttcttttttctttgtgaaaggcatttgagtaagactaaccaaagtagttcaaactaatgaagagttttttttcttcttctacttcttttatctgtgcttttaattttcaaactgtccaattcaaaaatggtgagaatatattaattgtatatatatgcattgagtgtagcacaattcacaacataagctaaattgtggagaaggatataaatttaatgcttacataatatattaaggaataatgaattttaagtgcgactaaatgttatatcaaatgattacatttattattgttaataaaaaaatattaattgtatatatgtacatgaaaagatatatatatatatatataatgaatgataaatgcgcaattttatttgcgaagtcatattctcgttgaaggatgctaatagcttgtaatatctgcctgcatatgaagatatatattagcttgtaatgaagatgtaatcatttctatacctaatagagttttgggagcaaggatgaacagtatatccatttttttaaaccgccgtaattaaattatttttactttgtaatgaaacattctcaccaggtttggtccttttaataatttattcatatttaaattcttttttatgtacaaaaatttaaacttaataataacttatacaattacccgaacatatatatcatctaaaccactgtcttatctgagagtaaaacatacaaattattatagagcataattatcgtcttacccagtatatttcttctaactagaatatgtgttcacgttatctgtttcatcaacatggttgacgaaccatactactgcattgtagagggctttaattaatagattacacactgttattaaggatggaaataggccaggccgtctatcaggggtctttggcctggctgtttaaggcctggcctgtttattataaaggctaggcttaggctttttgaaaagcctatttaaataaaaaggccgggctcaagctttaaaaaaagcctattaggcctatcaggctggcctatatatatatatatatatatataatatatatatatatatagatagatagatagatattaaaattaaaaagatataaatcaatcttttaaaaaaagaaataaaataagataagataaaatctaaatagtctatcttacttaaaagataaaaaataaaatagaaaatttgaaatctttgtagtaggtttgtataaaagtcaatatatatatatatatatatattaaaactaaaaaaatataaatcaatctttaaataaaaagaaataaaataagataaatacttaatctcatattagagtgctctaattaattttaatttttttcatgcacaaattaaaagggaagtatgtcaatatgtgtctttctttatattaattttaaaaaaatattatgcgaattctcaaagtttcactaatatataatatttattgtaaaataggctttttaataggctcgtaggccaagccaggcttttaaataggctagatcaggcctaaaaaaaaagcctatgacaggtaaataggctaggccagacttaatgtttttaaataaggtcaaggaatattggaatgcatgcatattttctttttttatacacacaagaataattaagagatgccttagcatctcatactgataaagaataactgtgtatattaagattaactgtgtataaaagacacaaccaaacaaccaacattattaatagattaaatatcacttttggttcttaatttatcttttttttattcaatttgattttcttcatcttttaaaatattcattttaatcttttatattttaaatttattcattctaacccttttttcaatgtagatttaacattgttaataattttaagatattgagtattaaaaatcgtcataaaacaaatttttcttcttctaaaatatctccataacctaataacacataatgattgcttttaattcacgcactctattttatttctattattgtgtattgaattatgctgtcttatagaacaattaacaacttatatatttttattttagtttatagtgattaaaaaaatatgttattaatttgtttgtaaaagttaatttactttgaataattttattttttaattatattttagaagagttagaacttgtttgggtatgttcttttagtaacacttataagataagaaaataagaagaaaaaaataaaataatttctctataagttaaaataaattttctattggataatcattaattaatttataaatgtcctttcatcttttagaaaaatatattaaaaaccttttataaattgactaataaaaatcttattttagctaataaaaaagtttatctcattaattttttatttcttttctttttcttaaaagtatttctaaaaaaacttattcaaataagcctttagtgatcaattcatttagactactcctcaaggattggattgaacttacaaaattttagctcaatattaatttgacctgccctagctaaaccatttttttttggcatgctccttgattgaccaatacaaatagatcggactatctcaaattgatagctctataaatttcatcaaatatgtcaaatgcacgactattttaagtgagtgaagatttcataagtgaaaaacgaattacttaagtgcatatgaagatatatattagatatagatctaataaacgactaatagatctaataaacgactaaggtttttatttcagatgtagtgtgaaatattggttctatcataaatgatatataaaactctcactcatgtttatatatactacgtatcaagagaaatatcacgtcaacttgagtctgttacgcagaagttataatttctaactttcggtcgacacacgtaaattttgattaaatgcggaaacacacagttaaaagaagaaacaaaaaaggagtttaaacacaggaaaagatttcaatatgcttcaattctagtgtgaaaatttgtagctcattgacgtaaaggttatgctcgggatttaggcccaacatctattacttgaaggtttgactaattaattggttcagaacttaggttagtctctttatgtatcataggtacgatttttttgatgaaatcatcacatgtacgattaatcagtcataagtttgattctaattatgtaatctgaagaaaaaaaataattattattattttaaataaattcgattaactattacacatgcacaccttataaactgcattcatatatttgaaaacaagggcttaaacgggccactaaaacttgaagataaccgtgttatgaaattagcattttctgtaattaacttcaacgtttattttttagtaatatcttttttttctccataaaagcttatattatttaaattttcttaattaattttaaacacaatagttagtttttttttgtacttcaatataatacaatagttagttaattacatcaacctaacatgtgtttatattatagtaaaaaataaattgtaatttttaattgttcctttaactagatcctgcttaaaaggagatctaattcaagcacattcaagtattaagtgtaattgtttttttaggttaatcgttcaagtttatatagaattgcatcagaactaatcaatcagataattttgcaagagtatagtgtgtgattctatctgttgttccgagatcctcgagtgattaaagttgcttaacaactaagcattgcaaaaagtagaatgctgaactcgtaatcaggaattccttggtcgatacatgagggcatggaacaaagggagctccaactgagcctaatgacgaaatccgactgaagggacttgagaagtgcactaataaataagaatctttaattgaaagattagtctcgtatcatgcaagtagacactcaaacaacaaaaacaaatacaatggtttaacttcatagatatatattttgttcctgatgatgagtctatatatgtacccaccataactccacaagggtcatgtgaggtcacaccgctgtgtcctaacacattgtaacaccaaattcaaaaggtttaatgaagataatttaaatattaaccaagtcatttaaatcaacaaggtactggaaagtcatgagaagaaagaaaaattgcaactgagaatacaagtctgattttcccattacccaaaatacaagatatatattgaagcctatgcaaatacgtcaacataaaacctggtcaaattctgcaataaaaaaataatgaatcatactaacactccatggaaatggaatttaatgatattacactaagtatttgtcttttttttaatcatgacttaattcatataatatcgtaaattaagaaacattgtattaacaaaaatacacaatattacgttgctatctaaatggaaagaaatatgtataaaatcaacaaaaagacctatgaaatataatattaataaacctagttcaaatacttaagatgtaaatatagtgcgcaatatttcacatatatttgataaattattttttagtctaaaattaattttaaattaaagtaattttagataaattttgtctctgatgaaaaattatataaaacttactattaacttattgttaaacattcaaacataaatgagtttacttaaaaaaataattttaattaaaattaatttaatttaaaatcaatttacatgcttattcaaatattatatgtgtgtttagatgagatttagtaaaattaattttaaaatgatataatttatatttgtatgtttttttattctaaatggacattagtagtaaaactttataaattttttcattcaatacaaaaattacttagtgtatatagataagtatcattaaaattgattttgaagttatatgttttatgtttggatgttattttttttatcaattctaaaactcaaaattctttaatgtgaaaacataaaaatttatttaactaaaaatgatatttcaacattatagagaatctaatctgacaccatgccacacacttaaagttttctcaattcaatcaattccagatgcaaaattgattttttaacataaaacaaacatatgaatattacttaaaattttgttacctgatatttcaaggtgattctaaatcatttaacttgaatccaaacttaatttgtcttaaattcaaaaaatgcaagagttgggttgagtgagcaattgaaaactcaggtttcaagcatgagagaaagagaaacggggctgaagtggagggaaacaaatctagattagattctagcaggataaaatgccaaaactcaaaatccaagaagcaaccctgcagctatgcttcaaaaattcaagctttccaagtttttgcgtgcaaacttacgttcacgtccctctccttggaattgaatgaaaccccactcattaacaaagtcactttcaaaaagacactttcattgtcccccctcacctttttcccatacatgaagaaaaatgaacggttaatacattgagcatgaaagttgacaggtgaaatcccaaaccccttctcactataccctttttcttttattttccaaacattacacaaggagttactaccaaattattattttcagtactgagagttggagggtctattttctgtccataaatacctgtctcataggccaccccacttccatattttgcaacattttctcctcacatgttacataacaccaaagaactacaaatagttctcattgcataggtacaacctaattagctagctagatacacacccttgtttctttccattctgtctttgattgattattatcttcatatcaaggacaagcttaatagcttatagtttaatgacctttttattccaaagcttcttctttggttctcctaattaagttcatgcatccttaatggagtgatactccaaattaaataccaactttcggtgttttactttttttttttttttgctaattaaattttttaactagatagctctggttgcagccatagatggagtttcccaacgaagcaatatcagaagggtgttcacagaagaaaacgggaagagggaaaatagaaatcaagcggatcgagaacacaacgaataggcaagttaccttctgcaaacgccgtaacgggttgctcaagaaggcttatgaattgtctgttctgtgtgatgctgaggttgctcttgttgtcttctcaagccgtggacgcctctatgagtatgccaacaacaggttcaaatattcttttactactgattcaacacagtacttttcctctccttcaatctcatttcatatcttatgaaccatttaaataacacaaaccatatctagaaacaaaaagggttttatatatggggttaagaccttttttcttattatgattatttttgtttgttatgtggtatcatatataactgaaaggcatagttagtagataatcatatgtcgttaaaagtttaattttttaatttatatgtatgaaaaaatgtctattaaaagatgctaattatttaaacaagcattaatactttgaaaaattagtttttttaacttctgaccgatgaatactctaggttcaccatgtatatatcattctttctaactgttgtacttaattgttgctctatcacgcgtcttcccagtgatttttaagaagggtgcagatctgtgtaagcgatagaaattatagacgttaaggtgaaacaatatgaagtatgtagcagatgaagagaaagctttagttagggttacaaagatttgcaggtgagaaatcttagcttcctggtgtatctgctattgttaagctttaccaatccctctctcttgagtttctctctccacttgtcatccatcaaatcttaaaagggtctgggttgctgcacaaagctgtcatgcactcaatgagccccttccatcttgactcctccttaataccacttatttgtcaatgtatagtgacacaacacaagcatctcatccaattgggagttagggtttcagacttttcactatttagtatttagtcacacctcaatcacttcaattcgtttttacatatgtacacaaagttggaggaagaccatttcaattctaatgtgatagatcacggggaaatgcgcagaaactgcaaactaattaaataaccctttcagacttttattcacatagtaaacttgtatattttttttataacatcttttttatatatatctttttattgtataatatttttattacatacaaaaatttaatttgtactaatatagtttctctttttaagaatatttttatctccgtacaatgaggttacacgaagaagcaatcaaatcagatattagggctcttgattcaaaatgggtacagttttctttaaagttgcaacagaattttcacaggattaattgtttatgattaattaaggtcatttttagtctataatgcttcaatattttttaaaattcttactaaagtattcgttataaactctttttgagcataaagtaaatcaatttaaactaataagtatatcgagggttatggatgtcccaatttgtttcccattttcgtaaattttgtcctttacataatggaggaaagtctaatatggttagggcgtttcccagcccatagggtattatttggtgattttactttaaataacttgaatttcttttgggtacgtaaaacaaaaaacaaaaaacaaatgaattaagatgaaaaggcaaacgtgtaagaatttgattttgtgcataaaactagaaaattatgaagtgtagagaaacaacttttaggagaaataaatatttttagaagtgtagagaaacaatttttatgagaaactacaacctcattttctcatcctcatctcctatatttttaagaaaatatatcatagtgtttagatattattattcccgcttctgatttctttaccctaagtagctaaaagtaacatgatgatagcagattctaagaatggctaaaggcaaattaattctctttcccatatgtttttattgctttcatctttgtggaataaagcttcccattcctgacgtcaattctttacctattctctccattatatatgtgttttggacatttcaattaaagagaaagttaaacttacaccggcccactgatgcaacatcgacctcttcctgcatactcagtaaataaccactttgtatttgaactttagagaagttcagacagatggggtttaccattctttaagatcaaaagaatgaaacttcgtgtatttaaccatactcaatcaactagcttgttaatttttgtgttcttaatagaaaaaatttggatagggcctaacactgtaaggtaaacaaagaaattaaagcaagaggtcactgagctatttatatgaaagagaaatattaataacatttttttaatattaattataattatgggtaagattcaccagataagaagatgcacagaattttataatttataataattttcaatcaataacaaagaatgtgttagataatttgttcctagcatttctcttgcatgtaatagatgtaatgtaatttgtcaatttcatagattccaatggacattgaaattaaaaattataaggcttaaatatgtttttagttcctataaaattagcatgttatttggttcttataattttttttctttgctttccatccctttaaaatttaaaattattgatttttcccctttaaatatgaataaatcttaattttggtccctataaaacatatatttttttttattttaatctctagaaatcctttttaagatattacatgttaacattgtaccatatatatagacactagctgttgttacctgggacggtcacttgacattccgctgaacacataagctattaacgaatgtcacacaataatagagataaaaaataaaattttaaatttttgcaggatgaaaattaaaaataaaattataaggacaaaaatcaaaattactaattttatagaaattaaaaacatattttgctaaattataaatatacacccatttttattacaatctcaaagctttttggcctaagaatttaatgtcaaagaagatgagttcataattaatttgtaaactacagattaagtcgacaccgtgtacgtgttttggtaaaattagcatgtactttatcacatttttatgtttctatttgttgtattgttttgcagtgttagaggaactatcgataggtacaagaaagcatgtgctgcttccacaaatgcagaatctgtctctgaagctaatacacaggtaaatttagtaagctaaaaaaaaaaatcaaagaaatgatagaaaatgctcttgtttggttaatttggtccagaataaatgttgttttaaaattacggcatatttttcttaatagaattacagcgtacgtgaaggttaattatttcaagctgcaatcttctcaaagccactaaaatcctttatcattaggatactctaatagtctaatgcttagttttgaatgtgacatttacgagttcaaatgttcaagggacatcttcaccaatatttgacagtttggtattgagaggtatgatgagtcccacacgagacaatgttaaaatggatcaaaccaattcaatccaatttaatctgcgctctcaactcataaaattaaaaatggattggacaaattttaagaatgggatgaaaatcacaatcgatccagcccaatcttagtgcattatgggttggattgaattagccataattgtttttaaatatataaatattatatatataatatttaactcagacttatccaataaataaaacaaataaatactttaaaaaaatctaaatatattgtcattatcataataatactatcttactaaatagtcttagtataaatgttgtttaaaatttatcatcatgaaaaaatataaagtaaagcaacaaaataaataatagttcaataaaatcaacacttattggtataattatgtttcttaactaaatgattcataatatttttagatatgaaataaattatattagaaagaaaaaaatatccacttaatttatatatattcataattcttgaaaaattaatatcatactaatatcattagaaaaaaaataataaaattatgtccaataaaattccaacaaaataattcacaaaagaatccaccttttgacccattgagttaacaagttatgtaaatttaacatttaattgcataatgcaactcaacctattttcatgagtttaggatgatttgtcgaaatttaacctattttttacaatatatacaggttgaaacagttagaaatcagttatctattagctcaacaagataacagttaaattagttagttgctccttcagttatatatatatatatatatatatatatatatatatataattatgttacttttctctctcatgatatatcaataatacacattattttgttaatatctctcgtgttcatgttctctcttcacttgagctctatagactgtatcatgcatgtttctcaacacataattcaaatcatcacactgaaaaatgaattatttgttttatatataccttattctgcgttctagttaaattttaattctcctatcactaaattaattgctatatcataatgctcctccacaaggtttctctaactggttgacactatttatcaataccagttttatcagcaggaagcgtccaaattaaaaagacaaatcagagacattcagaatctaaacaggtcaatgttccattctcttaaaaatattattcatcagacttctccattgaaatgaaaaaattcaatgtgattttttgcattccaggcacatccttggtgaagctcttagctctctgagtctaaaggaattaaagaacctggaaagtagactggagaaaggtttaagcagagttagatccagaaaggtattatattatcagcacgaagcatcttaagcttctaaatatataggcattgtgaatttatgtagatatgcaagaagttagtcaaaaactagcaactaattaagataatttcagttagtattttgaaaattccaagttagaatgtctctattcctttggactaactacgcactccaattctttcagcatgaaactttgtttgccgatatcgagttcatgcaaaagcgggtactcatcatttccttcgatgctattagtttctgcttaatttatttgcttcatacatatatatatatatatatatatatatatgtatgtatgtatgtatatgcatatatatagtatctaaagaaaatatatcaaagttttacgatattgaaaccaaatgcatattttcaattaataggaccaagaatatgaaactgaaacgggataaacccagaagaaattccaatattcgtgaaaaataaagtaaaaatggcttgattgcttcgtacgaagggaattataaaaccttgcaaatttatgcctgatatttatattttttctaacatgaacattatacttgctgaaaaaatgcaggaaatagagctgcaaaaccataataattttctgagagctaaggtgatcatctcttaattccctccaagactctatatataaagtgtatgtcgagatgaatgataattaataatatatagttggtggatgatgcatgcatgtagatagctgaacacgagagatcacaacaacggcaacaggatatgataccgggaaatgtgtgcgagtcaaccataccttcacaatcatatgaccgcaatttcttccctgttaatctcatagattccaataatcaatattcacgtcaagaccaaactgctcttcaacttgtgtaagtacactcatcttccactgttaattacaagttgttgttattgaatgcccttttaataattattaattgatgaaaactaaaacaagctcgagggccaatgaccaatgaaacaaacaacttaattgctttcaacattgtaccaatcctttatatgcatgcaaccgtatatgcattacataagatttttaaatggctactaacaacatgggttttaatgtgggaaagtggttagtggacgttcaacttaaatggctcaggctgtgtttgtattgccctttagcagtttgaacgccaaagctttctctcagtaaaattgtggttcaacgtgcattggaacataagaaatagttcgacttacatatatatcattttacttgtttttaagtcatcaatgtaggatttgttattcagcatctccccaatccaaatggcatagccaagctataacttgttttcaatagtcaaccagggtaaatttcacatttgatcgagattcaaagatcatagctcctactcaagtctttttttgaaatcccttttcctttttttgtatatgaccttgttttcttttctgggcaggtgggtttttttaattttctttcttaatactgtttctctcttttggatttagtcttttcttgtatatgaaattttttaatagaaaaaagatgagtggacaccaatatggtaatatctatagttaaatataaagagaaaaagtttttttttaagcaatataaagagaaaaagttagagacaagtataaataataaataatatgacttggtagaaagagatgtattaaccttttatgccgtgttttttatatacaaatccataagttcatgattttgacagatgattccccatggcaaaaccattttgatatgtttctcacttccttaaattctcacctttggatgcagctgataagtgatttgaaattatgccacagcctttcaagtggtgtgggagcccttacatcgtcctatgtttcgtgaatgaaagtgcccttagaaattcctttgctaaagttcttacaacggagaacaagacaaaagctaatcagcacttgtaccaatacatcatatgatattgtttatgtatctttcaatatatatagtttctattcagtcctggcatattgtatttttatgttataaatgcttatttcaatatgaacactatacctatcgaggagtaaaagttaattgggcctccgcattattcatcatatataatttctccattatattccccccaattatataattctgaatatacgaaaagcctgaataattgcatttttttttcatatgccgtgatcactctccgctagttggggaaaaaatccttgttttgaagaagtcaggcttaaaacttcaaagttggacaacaaagaggaggattaagctagatcagtgggttgcttctgattctcaagcatatgaggaataacacaactattgtatttgattgtgttgcaagtcttacgttgagtaaaataaaaataaaaaatcaaagtgaataagttagaaatgtttgagtttattaagtttagacttttaggagaacatgatacctaaacttaaaacattaacgagcctaaccacattctattattaggcccgcaatccataataaattgttcggatagatttccttataaacacttctagaaatgaaaataagaaagtaaacttaaacgaacttcaattcaccctaggtgaaaattagtaagttcttttttttttaacttctttaaaaaattaattttaacttatatgtaacctttgtcaaaacattatatataagttaatttttaatttgtgtataatgtttatttcatttttacttattattttttctcttataattaccagaaaaattatccaaataggtacgtgttttaggtataagctcttcggctgcatgatttcaacataacttaagaatatacccattcacgtgagagaaaaaatcacatagtagacctgtccattccctccagcttacatacagaaattgcattaagtagtaatccctgttgtcctaaatctttaagcagttttacttccaaaatcctcggtttcttgcagtatatatagtgaccaaactcggcaacatttgttaccggggtctgttccttgttgtccaggttggagtcacagtgaaattgtaccaatcaattgtgcaggttcctttgcctcctttttgaaaggtttgtagcctcaaagtttatataagattaatgttatcatatatcaaattttgacaaaaaatttatacaagaaagagagatagaaaaacaataaatgttataagataaatggtactataatataaataaactgttagggacaaagtcccacatggtgagctttgcttttagcttgcactccaaagccataaaagaaggcttggtggaccctttgttcacatcccaaaatcatttctcttcttcctttatttatatagtctacttagagaagaaaaatatgaaaaaaaatagtttctccgttcttttagtagtagtattttcctctttggtagtgtcaatgtgcttttcttgtgttcggagagagaaatgttgtactttctttcacttaattagtaaaattcttttcactcattatgatgtcatactcttttctcatctcttattttaattgaattataattttgttacttgtcacccatcataaccaaaaaagtgaatgggtaaaaattattttaaaagtttggtgttgaagtgttttttctaggaagtcttatttcaaaaacataattataaagattcacacgtcaaattctgttagggccttttgactcaaaatctcctcccgcatttaacttttagtacaattactttatataattgatgttaaaagaattatttttatttagaaataaattttcaaaagttaatttagaaaatttagtcttaaaaaaatcatttataagataaaattgtaaatatatgtctaaaattatgtggtatatacatctaaaattaacttttattacctagaaagctaaaaaaaattactaattccaaaagcaattttattttttaagacggtcaccattaaaacattattactagatacatattacaaatataaaataaattaaatattgatcagtgtcttctacgggcatattaatttttgtttttattttatagttcctcttattaaatacgttggaatttatattgctattatttttatttaaatttcaattaaatataaaaaatatatagtgctagtgttcatgaaaataattggatccatttatatagatgcagttaaagtaaaggaaggattaattctcgttcatattaattattcaacaggtataattaatttaaagagaaatataattagggttgatttgagaataaaataactaaaacttaaattttgattgataaaacaaaatatacttttaatttttataaaagaaaaaaagtcacgcatatatatataaaggctccaacattatagctctcacgtataaagtgaacaaaattctctcaaattttactttagccacacttgtaaattgttggggaccgaccctaattaagtatactaatgtaaaatactcttttataaaatcggttactattagaattaatccttcttaaaaacacctgctttctatatcaattgattttgcatctatatacctagaatcaatctagaaaattaaaaataatcatactgaaaagggttaataatatgtaaggagatttgttaacccttaatttaactgtaacattcaatgcaagtaaggatctaaaatccaaaattaacaagatacaaatgctgttcaagtgaaacaatatctccattttgaaaaacaaaataatttactagactactggattatgatgcttatatcttcatactcttaaactgtagagctactgctagcttcttctaacagggtacgtattgtatacttgcttcatctatttgctatatatttatatatggacatgcagggagcattaccgtaagtcagagactgaaggcaagacattctttcctcttatcccatacggtatcattctatctccatattggaggtggaataactttgtctcttcacactataatcctacatttgctaataaacttatcggagaaatttacatatctagtccataaaattcgaacctcaggtaagccaatttcaagccacggctttgctgggccgttgaaatgaacaatagcagcagcttccacactctctatgctattgctaatttcttctgatcgatggcgataacccaaatcagtgacgaaccatgatgaatctatggggtgcacttgacccgcaaaagcaatcaaggcaggtggaagcactccaggattccataatgtcaacccggactggacgttctatgtcaaatttcaaatcatacaagtatacatgcagttaattagtatgatcatcagaattcacaagacagaagaaaacagcaccctccatgataaagaattgaatatagtgggcaattaatatttctctctctcaattataagatgactaatgatagatgcacacctacataatgtatatacttactaggatcttaaatacaagcaatacaaattctttatttttttatttcaaatataaacaaattttaattatatgtgtcttatttaataagattatctctaaaatatctttcatatttttcatgtttaatattaagtttcaataaaaaataatttttaaaaatatttatttttaattaaaaataacataatttaatgagttaattaatttttttaataaataagaagtatgttttaatcaagaccgaaatatatatatatatatatatatatatatatataataaagtgataacaatattaatttttttttatcagtcttgtcactgatataccacatgcatcacatatctacacatttttctcttatatctctatttctctttaggtgtctagcagtagcgcattagtgtccatggattatttaactaagacattataatacttgcttgatatttctcatagtccatacaaactaataaaagatttaatgaacatttcaaatcactcgtgttgatgttcattaagaatgatgagacaaccgaattaagaagtaaaaatgtgaagttaaaggattatcttgctagctagtaccattttgaagcatatggaaatttgtcaaaacacattttaaatagaaatgcagttgcctaataacttccttatgttcatcaaaatatacttacaagtttcaaccattgatgataggtcttagtaatatttgatctcctccaagcttcaagatcaaatatattcacgccaaagagccatgcacacttatcaccatcaaagttggatgatatgataggatgtgaaaaattcaaaaagctgacgtatttgtttccagggcagcaactgttctcacaccatgacttgaacactgaaccactgactttgccattaatatctagttcccacaaagaagatatgtcatgttgtactacaacatcatcatccagcaatactaccttgtttagatctggaaacagctgtgatggtccacaaaaaatcagattatgaaacaatcatgaattattactgagcattcgtcttgttaattattactaaaatttattcaaggttttaaattacagtcctatagtttcgttgagttccttgatattacaggaaaagtggaataattatcaattttggggagtcttatttctaaatcatgaaagggagttattaaatgaaacgttaaactcaaaaaaaaaaaaaatgtcaataaatttcaggcaattataaagaaaatattagaaaaatagtaacagagactattattagcattgctcccacaggaaattgcgaactaatgcagtcatgattgtaatcgcattgcagttgcaaacaccacaaaaaccttccaactttgaaattgtggttgcctactattttttaaaaccttgatcaatcttagggctagctaaagaataaagaaaaaactaacatgtattacctcagggatatagatgcgaagatgattcaacaaggaaaggctgctgggccttaaagcttgaaaatatctgttatgctcttcactatggtcaagctccttttctttatagttgttgtcgtagtgcttccaaattaactgatttgtttcctgcatctctctaacaccagcgttcacttctttagaccaatcatagtggtgtaaccctctaacttgtacaactgctgagttaatagagttgatggcaaaccaagtatgcattggagtataagttttcttgtcagtaacgacgtgaaaaactagtcttccagggttggctgaattttcaacagtggaggttacaaccacggaagctgcaaggacgttgtcggttaggagaacaatgtggtgaaaggtgggatcaactaggcgagagacatgttcaggagaaggtagacgagatcgtgccatggcatttacggcgtattcttcagccaacttcaaacaaagacaatgcagactttgaggaacaccgtgtgaagctatatgccaattaagtgactccttctttcttgctgattgcacctcacgttccatctgtgacagctacatatatatcaacataaaataaaatgacatgtcagacattatactatatcctaagagtaatcaacaagcaaaagattatattaacaacgtaaataatcagtaaatgttgtgtgtaccatggctttggtcttgaaagcaaatgccttgaggtcttgttttaacgcaaacactttcacaagctcgttaaatgacattgctcctccttcattagcattgccatcatttgcctctattagcactctggtcaactcatctctgagtttcttcatgcacatacatacagtatcaccgtaaaaaacgagaatgaaagtcacggaaacgtaaaaatatgagagaaaaaataaataattttctcatttatatttttcatatatatttctttttcctatatataaaatctagaataaattaaaattttactaaaaacttacaaagctataaataaaaccatttatgtgcttttaccaaagctttttcaatcagctttataagataatattggagtctccatataatatggttaagaatttaatcaatccttactgtcctcattattctaaataaaaactaaatttcagaacttgcaatttgaaataattggttcattgccatgtataaataaaagttcaactttagcgtaatttaaaatagttggttctctgacatgtcaaatggtaattaatctgtaagcttagaatatatagtcaaatatcatttttatcaaaatatctctgaatctttctaacccattttctgaaattttaaataaattattttaacaattgttgtgtccgtaagatattgattacggttttttttattaaataatagattatatgtttaatatgttattgtcacttatcatttgatagtcttttttctaaacttttattttgtcttcttattttctttttgtcggatccccatatgaatatatgataaaaaaaaagacaaaataaaaaattatggcttattatttttttctaaacttttattgtatcttattatttttcttttgtcggatccccatatgaacaatatatcgtccgtgctggcagctagtgttcgtatttaaattcattttcattttaaatttataaaattatggcatttaacttaacattattttttacaacacataataaaaaatacagttaaataaataataataagcttgtttattaaaaataaatatatatatatatatatattagtgtacttatagttgcgtttattttataaaaataaatcatagaaatttaaaaattatttattccagcattatccagctcaccttaaaacgaattaatgatcatacatttattaaaaaatgttatccaaaggattacttataagttgtttattcaaatacaaataaacaagtcaaaaataataatagattggttctaccagattggcgtcacctccgccgaaaaatgtcgatcccacgcaatctgcaacaattacaatggttcatatatagatgctgccataaacttttcaacaaaagatgagctcattttaaggatgatttaagatttaaatttatctttgtataactttgagttaaacaagctaaatatgtaagtttaattttgatgtcctatcagtgtgaagatttttttataccatctactactaaaataataactttagtatgacaaaaaaaattataaaaagaccaaaataaattatttaaaacttaatgtatcaaaatagaattttcaaaaatataaaaattaaaatcaaatttttaattaaaacttaatatatcaaattaagaaaatagatcaaaaattgcatttaatttaataaagtaacatgaagagtgaaactttcattctatcaactcttttaattagacacctttaactgtattttttttctcttttatacggatatgcatttaacatattatcttatcaatgagataaaaaaaaaagtcattttcaatcatcttaaactagtgatttgattactgattaagatttaatattgattggtgattagtgatcttaagtgcacatagtattatgagtgcatttgataatattattatttccgctgataaaaaagtacattttatactattctcctattaaaactagacttttacttcactaacatatattaacctttaaacctttaattaaagtcaaattttattacatagattattaagataaagctttaattttattgaagaatcatgttaaaagcatttataaagctacacctgaatattaataaataaaataacctattagtggtataggatttaggagttaattagggaaacattaaaattaaaggtatctttgtataatttataggtattcttcattgaaaataattttattcgacttaaataggattagtatatatccatgactcaaatttaaaataattgattaagttaatccatgtattccattaatagttaaaaaattaaaggtatcacaaaacttaaactagtttttttcaccttttataataataaaatcataatatttgtaaagataaaaagtgcttatttaaatatattatttcaaaatattttaattaattttaaattccactacacttttatcctttcgtttgttttataaatttcacgtttaaactatgcacagaatctgttttatctaattaaattgaaacaactgcatttctctatgaaaaaataaatatcaaaacaaaaagaatgttattgcatgtgtttatatataaaaaataattattaaaagttttaattgcagcaaatacttgttattaaaaaattcatttcaaaatgtttcttaaaaaataccagtattattaaagtaatcgttaagagaattttgaaaaatagtaaataaaaatttccttgagattattatgttggacctaaaagaagccaaatgaagctgaaaatagtaagtttcggtatttattattttcactatgattatatacactgaaattcattcatatgtacttgtcccacactcaactgttttccttaccgaactggctactacaaaaaagttaacagtaaaagaaaaaagaaaaaattacgaaccaaaagtaaaaaaatgaatcggaaaagaaaaattaccaaaggtggagcacaccgcagaagattccagcaccaaaaccgccactctcacaaagctgagcagcaacacgattccgagcaccaccaccatccggttggaaatccggcgagcggggacggtgtaggcaggagcagtggtcttggcggatccttttccggcgacgagtctcttaatccgctttgcagatacatagagcttcatcttctgaattccattccctataagctatatctggctagctttctctccgatcgaatcggcaccggatctgagtgacgaagagagtgtgtgtgttgcattcgtgtttggatcggtttctgcgattgaaatgagggttgagttttttagttacggggaaaagaaagaaagtagtagttgctgaagtgagggagataaagaaagagagtggaaatgcgaaaaccaaagtcgcgggaaatgattaatatagcaattacaccttggtgttgcgatctctcttttcgccactgtttttcacgttatttactcttttgacactctttcgccgacacctccatgacgtgacacccgcttcttcgagatgctgccggtacctatgaggctataaccagtatttttcaatttcattttttttattatttggtcattttattttttcaaaaaagaatatataaattgatagacataatcaacattttattcgtctgttgatatgattttatttttatttttcatttataataagtgaaaatattttaaaattaaaaaaatattaatactgcctccttctttatatattagacactttttttaaaatctatttgtttttttattatatttttttgagttttcttttgtattaatctttttaattaaaatattcttaaattataataaatattataaattaataagataagttcatctattatcttataaaaattgaagaaaatgattagcacatataaattaattagatgaaaaataattaaaaataaaaataaaaaagtgaggcatatcttgataatttttaaaaaataataaaattttaataaatttaatattactaactaaattaattaaatttaaattcttaatatgtataaattaattaaaagtatcttatatttaaagacaaatggagtatattttaaattttgcaaagaaaagtttttgtttaaaaaataatagcgctaatgataaaaaaatatttgtatttacttaaattaaatttaataatttaaaatttgaatcttattaactaatatcttaaacatattggttaaataagtagtagtaataataataataataataataataataataataaaataataataataataataataataatagcagcatatcatgctaaaaataactcggatatactcctatattaattaacagtatttttaatagcagtaaaaaaatagcatttttagtaaaaacttatacttttaattttttattgatgttctaaaaaaattattaaaaacttttaataatttactatcttttggaaatctaacgtttttaatgactattaacaaagaagtactaccactgtaccactttcactcgttttttgtttttttaagaaattaatgttgaagtcggcgatcctgtctccaacctccacgtgttgttcaattttttacaatgcggatttgggctcttataattgtgtatccatttttaaaatattaatctatacttattgatcatatcatattctaaaactatatattatggaatgatgtgtgcaacccaacgctagatgtactcagaaagcaatcacaagtaaaatatctagctagcctctaggtatatatttgggcttatttattttagagagaaaaataaacaatactattaattattaataaataagattaatagctaatattatgtacatatgcaataaattatgactgttttaaaatattgaaaaaaaaatcatgagatatgcataatttagagaagctagccaaatctatattcagaaaattatatatatatatatatataatattcaaaatattaaatagcatattttaaactacttgtaaattattattattattattaaatttgccggtagtagttgattatcacaagttctacattttgcatgggttttatcaatgatctcctaattaataaattagatttggatggacatatgaaaaggaatctaccacttatatttaattgatgttaagtagtagtagtatttggtacggcatacggccccagtttttaaaacgttgtgtacagccacacatctgaatcaaggttttaaaaatcatagtgggagctgaggcgaaatggtataattaattataattaatattattatttttattttaatataatatattaaataatattaaacaaaaaatcacataatatttataacttcataatattaaaaaataaattaaatttataaaattcatgactcataatatataatattaaaaattaaatatgaaactaaatcaaatatatcataatatttaaatttaataacacataataatatttattagtagtaactacgcttaaaaaataaagataataaacataattatctttcatcataatattgttttagaattatatcaacaattataatatcaagtttttaatttaaaatataaaatataaatagtttttttgggcaaactgattcaaacttggatgattcgtccagttttggattagttcaattggttttttataccagtttttttgtaagactgatttctagagttaaatgaactggtttgattattaatttctggttcaaccagtgcatgccaattggttggtttggttcaattctaatactaatattaatctgaattattaataatttttgcgcgcgtgtgaaatcttaattaattacttgtagttcgatgccaactgagaaaacataatcctgtttcatcattaaccaaatttacataaacttcaacgactgtatgttagatcttagtcttttttttattttttttttattttttatttttacaacgactgtaggttagatcttagtttctacaccgagatttttccgccaaggaaaaaaaaaatggttattattagtaagtgtttacctaaattttgaaaaatgtagagttctaaaaaaatatggcaagtggtagtgattgtatacctaaagaattagataggggtgcaaacaggtaaggatgacacgtaaagaaaaaatatataatgggaaaaaaaacttctagatgattttttttttttaataaatactactatatatcatttaaatcctctctttctaccaatttaccccgggatttagatcctctcgtaaaacgatatgattacgttggaaagtaaaagacataatagaaagaaaatactactataactagtaggtttaataatttatctgtctcttttgtcattctcctttttaataaaaagaaaagaaaagtagtaattatgtatatcgtgcaatgaacaactatatttgtaaaaatgtaaaagttaaattaaaaatattatataaaattaactcaattgataaataattattttaatgataacggatataaatatacaaatatttaaaaccttgaaacttttaaaatctcaaactattctaattaacaaaaaaatcatttatgatttacaaattaaaattctattataatttacattgatcaaagaaagttttcttcaatgaacgagaagcgtgaattaattacaggtgactattatcagaattcggttggatacaagtaattgtaagttgatgaggaaaatatcataaatctcaaaaagagttaaaaaaggaaatccataagtaattaacttattatagagcgaggaaactaagtagagaggagagagagagagagagagagagagaggagagggagaggagagaggagagaggagagagagagagagagctgcatgtgctctgatacaacaaacagcaagcactcatatgttaagtggaactaataggtctagcaatctataccatgcattgatgcatgttgatgcaatatctttgtcaagttgcttataatatcaatatatcatacgaatgagttttacaattggtacgtaggaaaattaaaaatcaaacacatgcattttaagtatctattagtttggtttcttttttttattcctttttctagagtcttatccattaattattttaattaaacatataattgaatgccttcatatatattcaattctccctttatttcttactcgtgtaccgcccttaaaaattgttataaagccctcgaacgtgatataagactaccaaaattctccctttaaaggactacgacatgattgtctgaccttaatatctcccttattgattcttgatgcagaattggagcaagcacatagatgagttgagtggtaaagaaaaaataaaaactaaaaaagtctcaagtttaattttccctgcaaaaaaaatcaataaattaacaattaatattttttgaaaaaaaatatgctatcttttatctttggtcaataattaaataataatgtatagacaatttttttatgaatatggaaaataagcacctcattaattattcttgaattgtatcacaccaagtccactatgataacgttatttatttacgggcacgttgattcaggataatatggacgtgaaatatggcactcacgctagctaccttgagtcattatacaatgaaatggataaggatgttgtggctgtacaatattcagtttttttttcttcaataatgaaaaatgttattgtggcaaaaaaaaaaaaattgcctcacattcctcacatcattaggatgataagtggatagaattatggatttgaacaaaattaataagttaaaaataattttaacttttaagtccgtcctttttcgtttgtgtgagagagatatgattttcattcaatgtatattatatctttatgtcttattcactattaacattaaattcagtccttaccactttaatctccagtccatatgaaacatatgctgtcttttttcacctatatatatatatatatatatatatatctacgtacttcttgactgttgagctatcactatctatggcttcatgttatatatgttatgtcaccattttaatgactcattagacattttttttagcttgcagtgatagtgtgaaccttgtagatttatcatgtttatggactcttcgcctaattaaattctattttatgatatacatatttaataggattcgatataagctctgtttttatctctaaattaactttagacaacatttttacattctgtgtgtgtgtttttgtcaatttcgtctatattggcttctaaatataattgttaaggagaaagtaataatacttgaatctcacatgcatatatgtgtctattttgatcgcatgtgaatcacacattatttatattgaatttacaacaaaaaatttatttccatccttacaagtttggtcgacatttcactttagttactaaaaatgaataggcaaagaaaagttataattcgcttgtgatcaagctaggtgggtgcaattctagctattcttgtaaattttcaggttgcttatgctttgaggttcagaagtattcaggaggtattgggtgatgagggataaacaacattggtgttggggtcattgcactagcgcgtccgcagaaacacagtagagaaggaccatcatgatccgcgaggaaatcatagctagcgaccatgtaaatcactgagttagagccgttgttgttggcctgctgttgcaattctgggttgtggcatgtactgctgagagaagatatatgcaaaacataacaagaaagagaaaatgcattggaaccaaagccattaaagacgagagagaaatcatactcttttttttatatttattttttaaatcagattaaatgttaaattacgataacattcttaaaataaataaattaaaatattaaattagtgatttttttggtcctacacagttttgtataaattgctaatacacatacactaagagaggatataagaatgtcaacaattttatatatatatatattatatatatatatatatacccacgtatacatatatatatgtgggtatcaaataagaacttttattattataagaagttaaaactctaaattcaaattgtataatcatacacggatattaaaaattaaaatttaattgtgcgtgactcttatatatatgatgactaatgaacttattatattgatcatctaggtatagttgtttgtcgtaggctaataatctaggcatagttgttggcctgctattgcaattctgagttgtcggatgtacttatgagagaagatgcaaagacaacatgcattggaacgaaagacattaaagacgagagagaaatcatattcttttttactttatttttttaaatcagattaaatggtaaattacggtatcatccttaaaataaataaattaaaatattaaattagtgattttttcatcctacacattttttataaattgctaatacatacactaagagaggatataagaagatctttaatggtaaattctaaattggaatcttaaatcactttttgattgatcccataatgttacataggattgaagatgtatcaagatctctctcatttgtttctttagtgatagatctaattttgagatcttaagaagaggaagagaaaacaaattattcttttttgtaggaaaacaaattattattttttgaatattatacagatcttctacgagaactcattcttcgtattagaaatttgttcatatgctttattgaaaaatttagtgaaaatcaaattttgaactcaaaatccatactcaagatttggtactaaagatactctaattatgttatatatgtatgtgactccaaaaaagagttttattgccatcgttttgtttctttcaagagctaattgtaactctaacatctgaatcttgaaaatgaatttgctcaagtataataattaataagacaaaaaatatgtttttaccttattctgtttgtgtgaaagagtgactctaactgaagagtctattgaattttaatacaagagtgagcttaaaaacttgcatgtttccaaaatcaacgtatttatatgtcacaaaataatctaacaaattattaaagaaattactaaagagtaaagacgcataagcgtcatgaaatcctaaaattttaaaatccaattgacaaaataacttatttgaaatcctaaaattttaaaatgggtaacgagttaaacaaaaagtagaatataattgaaaggaagaagaagaaaaatataacatgattaagcatattgaaaccaatatggaatctgctttacaaaggagacatatgaaaaggaggaatgtgatggagtgtacaaagtcaaaagctaaatttatggagcaaaggtgaaggtggctgaaggaaccaagcatgcacatgcacatggttgatgtttgttgtctttggtgcttctaaatgggcccacagttggcccagtaaatagttaagtgctccttgttctgttgttagcccaatatgagtcggaaaggtgcgggctgggacccaagatggaacttgcgtcacaaatcgtatcaacaagaataagaatgcttcttcattaggatcaaggttttttttttttttttttttttttttttataagtaaaacaactcaaagcatttcattggtaagaatagtcttaatacaagatgatatgtaataaaaaaaaactagtgactaacatgaaattgcgatgtctttcctagaagatgtacaatataatttgcttgtctcctaacaaaatactgaaaacagcaggatcaagcttgtaataaaaatatcggtgggaatttatattgtgagctcgtttatttaaatttattttgtaaaaagaatgtttttaatgaaataaacaattgtttttgtttttatatatttgtctaatttttttcttaatttaccccaaaaaaaataatgtcattgcatattagaattaaatccaaaggtctggcttgttgaatgtcatagaattagcaaatatagggtaaaaaactaatgatttctgccgaaagttaacttgcagcacagatactttaatgttttatgacttgagaatctttaaaagtgatgtttatatgatatgtttgtattcaaaaaaacattatatgtatttttattaattaaattaataaaaaatttccatgctactgtggacaggtcaaactcactatggatatacattcaagttacttgatgttccttgtgcataccttgctcaagaagataagattggtgagtagggagttgacgtacacattaaatcacaaaatgctactgtggacaggtcaaactcactatggacatacattcatgaaaccaaaatataattaatttataatggtagaataatagtattcactcttatttcaaaataaaagatgaattaaagtcacatttaaattgaatatagcttaatttacagccatgatcttaggcagaaattctataaattcagggatttctgcttctaatagaccaggaacttaaactaaatatacatatttatttcactttttaatataaatttaacacatgttaatttatatgcaatagtttttggtatgcaaaatggaaataagtttgtcaaaagtatttatatatataaagaagcaaactacaccagtatcttgtgatattctttttcgaattacgcataacataattcttttttctattgttacaataatatccttagaaaacattatactatacgcctattgtattacacaaattcccaataatatttgaaatcgttaaggtgggatattgtgtgtcattcggaaaaaaatcaggtgttaatgttaaaaaattatgaagaaggtaagggatgaacttagcaaaaaaaggggtgaaaacaacagttcccaaatgacagcaatccagcaaccgactaaagtgcaaaactgcaaatcgtttaccgcacagaacatttcagtgattcatccaatggattatccttgcacctagagattcaactcaacacttcagaggtagtgtcgattttggagattcaacactgtaggtaatctccttctgatttgaatgatgcatttgatttaacgctatcgacccttcatggtttaccaatcttctctcaagaaagtttttggtaaaattttgatcttttctaccctttctatcaacccttcttgcagcatgttgaagcgtggatacaaaccaaagccatggagtggagctcagaattgccgggtttctgtgttcctcatgtttttttcattgattctaatgttagtggttttccttttagtatttcgttatgacagtgatggtgctaatcccagtttagcttatgaacttcctaaacaaaaatggaatagctttgactctttggtgcatttgcatccaacaaaagagttccggaatggaactgatttgatatggcaaagtgcctgaatcacctaaaggtgttctctttctggctcatggatgcaatggcagggcaatcaacttctgggacaagtcccctgaatgccctgattgcattggtttgcctgaggaacggttgcttgtactccatggtcttgcccaaggttttgctgttattactatttcaagtgcacaaagatgttggacatttggtaaagaagtgttgttgttaaagacattatagagtggtggattgatagaaggaagcttgagaaacttcctcttgtggctttgggtgcttctttctggagggttattttgtgtctgtgcttgccaccgccgtaaagtttagtagtactgtgctcatgattgctgaggggatgtttgagcaaattgatgttaaaggggactaccgccgaccctttttgttcacatgcccaaagatctttataggcaagcagaaaatagatgagtatgtggaggttttaaaagataaagggattgatgttggtgttgttgaatgtatggagtttccattgtcaccaagtactttagctgatagaatccagggcttgatcaggctcttccagaaatttatttgagttctttcaggaaaagggctttattgataaaaatggttatatgaggaaagatgggcgtcaaatcaaatggaaaaaggctcttgaggagaagaaagctcttatgctggataagaatctggtccctcacatccaagaggagctaaaccttgcatttgcttaccatgagatgactagtgtgcattctggaccaaatttttaaatggtttgaatctcacatgagctcatcaaaacttacctgcattgaaaccacttgtatatgatggacctaaccttcgagtcaattttcctgaaattcaatctgagatccattgactcatgtaaaaactgctatagcggtttctttatcagagattgagtctcaagggctggaatttcttaattgggtgttactgtcagaagttatctatgtaaaaggtatgcctctgaaccttttgcaccaataccatatgtgctttggcaagcagtatgctgaatgttatcctagattttgttaaaattgtaatctttctactgtttttttttgagatttgaagcacaaatcattgtttaatctttgaaatttgaataccctggtggacttgagtttcaaaatacactttttaatatggctatcaaattatgagcctgaccctgcaagtttgactactagacttatttgccctatgatctaaacccaatttgacatctatacttgaataaaatttaaaataagaaatgcaaacataatttttaaataagaactgaaatgaataaaattgaagcgagttttagatgagggcttctaatttcaaggtgaagaataatgacagtattttaattaaatggcatacaattttcccttgggtttttaccctttgcttgtattgatggtgagaggtggaaaggagaaaaattatatgagatagtaaaaagatgccattctttggatgtttagaaaggaaaaggaatggaatcaaggagactcctttccactccacacctctctattcccttcaaattgacaggggagtggatggaataacttttgaaattatcttttttgccattcatcctaagatttaatgtgtttgatatgagggcaccatgggaacaatgaacttgtaattcttttaattccactcacttctactgtaattatgaatgggaagtgggaactttcttccttcctatcagtaaacatctttactatagtattttgagagctttcttcctttctaccaataaacatctaaattcttgtaattatatggtgctgtttttgtccctgcaagtggaggttctaagcacaagaatgctcctgaaaatggaagtgatgtggggtgaaaacattgtatattgtatattgtattttatgtgagatcttactatccttgttaggatcttacaatatacatgttcccctcctttccaatcctaggtgggatctcaatttgactaccttggacatatggatgacttcatattcctcttgtttgtcatcttaagcattcaaaagcttttggagcttaaaagttatatacacattggaattcttaaaattaaaagttttgggttcattcggataaactaaaataaatgcttttacatataattttcttatagttttttttatctagaatatattaatttttacttgtgaaaaagaaaagcacaacccaactttttctctgaggcttttgcttttttttttttttctccaaaaaacttatctaattaacataattttttcaaacatattttgaattaaaaaaatactttctttttaaatcacaaagaatttgatccatgttcttcgttttattccttaccattaacacaagtaaatatatcatatatagcaaagcaatataactttctagctacgaagtgactagagtagtagaggtctttaatatctcagttattatgttgctcaaaagtatttggtaagttgaagacgcgttttgggttttatttgtgtttgtgttttaaagatataatgaatctttttacgttacactgggaagactaaactagtagaggtctttaatatctcagttattatcttgctcaaaagtatttggtaagttgaagacgtgttttgggttttatttgtgtttgtgtgtttaaagatataatgaatctttttacattacactgggaagactaccctccttttatagtctttacctgccggtgtaattgttctggaccataccacagccttgtacacttccccttgaggcactttaaaagacattaattggagctcacatggcgctttaatccttcctctgccactgtaacccatcattcccaattcacataggggcaccattgccagcatcttggtccatctattgtctttgtttgcatatatattggcaacaaaaccgttcccttgaatttcactaggaaacaattctagacaacttcattctttacagtttgtaccttgttcacgttttcaagactcaccatatcattcttatctcttgaatgccatcatgttgcatgaacaatcgacatttctagactagggctatttctaaattacactttatgggtaatcaatttcttttgatagattatgtacatccttataggtggaccttcattaatgagaagatgatgcacccttttagtgctgtacttataacaatcctcagtttttatttgatgaattatatcacagattctgattttgccttccatttttagctgagttgaagtgatttttatataatgaaataagtttatcttaataagaattttgcattttttcatatataatgaaaagaagtttgtactttcgaatgcagatataattgaactattgaagtaacaatatataaactttattacagaataagaaacgataaaggctaacatgaacttgtaaagtaaaacgatatccatattacacaagataaaagcctaaataacacacttagaataagtcttagacataatattcttaactaaataaactgacacaaagaccaaattaactatatcatgctcgaggcttcattcgcccctcattagccatcttgaagaggttggcttgtgctgctgctaccttatttgaggcaagagatgctataaatctgtctctgacttgctgggttgtataagggaacctgttgttcaccaaggaattaagaaaggaagctgtcccttctctgtagagtgctcctagcccatcagttctagtgttggaaagtgcttgtggcaagctgagactggcaccaaatcctggcatactagagacaccaaatgtatggcctaaggttccccaccagcctagcaatccccaaatgattcctgggtgagtgttccagtagctgcaatttaagaggacaaggtcccataggttacttaacagtgtgctgtatatcatatcatagtttatagtgcaatgtagtgaaaagaagtagtaacttacttgcatgtaccagtgaagggagttgggaaggaagtaagggggtgtggagggatagtgggggtgccgggtcaactggggttgaaggtgggctcacagtgattggtgttgggggctaccacctccataagttggtggtgagttatagtacccacctcctcctgaggaggtttgatggtgttgatgggttgatggtgttgttgggactgagggtgttggagtagaggggtcatgtggtggtgtgccacagttgctgcctgagggtggtgatggggttggattgtaatttccaccatccgtgggtggtgatggggttggattgtaacttccaccatctgtgggtggtgatggggttggatcatagcttccaccacctgggggagttgatggagttggattgtaacttccacccaacctgaaggtggtgatggagttggatcatagcttccaccaactggaggagttgatggagttggattgtaacttccgccaccatctgagggtggtgatggagttggatcatagcttccaccacctggaggagttgatggggttggattgtaacttccaccaccacttgagggtggtgatggagttggatcatagcttccaccaccctgggggagttgacggggttgggttgtaacttccaccaccacttgagggtggtgatggagttggatcatagcttccaccacctgggggagtttgatggggttggattgtaacttccaccacctccatgtgatggagatccatgatgagagggtgttccatgatgagagtggtgtggtgagcttccgtgcccaccactcccagagcccatgatctggagagcagtatgaaaccttcaagaagtaaaagcaacgtatactattagattttaaagttaaatgtcaagatagtttctttaagagctcttgatcgttcatacgtcaaatttgaaagtaaatggcctactgtagctagcaaggaaatgatatcttctattttgcataaataatgaagcaaaatgtatagttgagtaagagaattacatagagaatttgataaaatctgttcctgcatgtgggtctggagagttgtagttcttctggtccacaatgatggcagtggtagatactacagggatgacaaggttctgagaaagcactccaagtagcaatgtgaacatagagaaagaaataggaactgtgtcttttcctctccattgtcactgactgct
